United States Patent Application Publication US 2004/0259086 A1 - sequence listing, part 11

SEQ ID NO: 61020 - DNA, 408 bp, Homo sapiens
  misc_feature 5, 10: n = A,T,C or G
acagngaaanagagagccttctggtgaaaatcaaagtcctggagcaagacaaggcaaggctgcagaggctggaggatgagctgaatcgtgcaaaatcaactctagaggcagaaaccagggtgaaacagcgcctggagtgtgagaaacagcaaattcagaatgacctgaatcagtggaagactcaatattcccgcaaggaggaggctattaggaagatagaatcgaaaaaaaaaaaaaaaaaaaaaaaaaatgtcccttcccgggggggccttttaaaaattgggggccccccggggcgggggaatttaattttaagttttttgaaccccgccaccctgggggggggcccgggcccccatttttggtccctttaagggggggtaattgcccccctggggaaaaaagggg

SEQ ID NO: 61021 - DNA, 388 bp, Homo sapiens
actttctttttttttttctttttttttttccgcaattcccccccggggtgggaagggggaaattggcccccctgctcctttcttggaatggggaacccgtttttaaggctccttttcggaaataaaaccttgtttccccttaccccggggccaccttggtgggcccggcaactcccttcaaaggttaatggggcaaactttcaaaggggtctccccccccacggagggcgtgcaatcgccccagggttttttaaagtaacaaaagccgcgggcccccccccccgggccgttttaaaattagggaatcccccggcctgcggaatttcaatttaaactttatcaatcccgccaacctgaggggggggcccggccccaactttttgtccct

SEQ ID NO: 61022 - DNA, 627 bp, Homo sapiens
  misc_feature 612: n = A,T,C or G
accactccaaattccctgccttctgcaagttgaatgtcttgctgaatgtgtctaggggttcatcttcagtaatcgacattccactagtgccatagttaacttcatgacatgtagacattcaaaacttgagccttggatgttcctgtggacctgacagttaaaaatataaagaacctaggattcaattccaactttctctgtttgccttgggttgaataacttatcttttggagaatagctttaagtggcttagacactgataaaattcagctgtgttgttgacgctcatctcttttgtcttacgcttagccatatttaaatcttgaatttaatagagtctagtgaaaaaaatgagtgggaagaatgaatataaaagtaataatataaggaaaaagggaaagtaaactatttagaatgtagttttgttatattcccagcatttcaatatttattaagttacttgtaaattactgtggctgtgtagtttataaatgtctgtgcactatattaattagaagaccatagaacatgccagcaggttggctaatgctatgggggtttttaccacagttgccattgtggaagaaattatttggtacctcgccgctctanactagtggatccccc

SEQ ID NO: 61023 - DNA, 408 bp, Homo sapiens
acatatagcgattgactggattggctttactaatggcttgaagcaaatgttcatcctccaggcacctggcactgaatccagagagtggctgactacatcgacaaatggcagcctccttatcttgatgatagtaggaaagaactgggaatcttcccttgctccggaacttggaactaccaacaattattggtttgcttgctatccggggaacataaagttctctggggtaagtttcacaaatcttgtagtcccggttggcatcagacaactgccagtgtgagtttggcactcccatcctcttatattcctcagcgagatcaatgagctgccagccttgtagtcgttctgaatcattttgtttgggattataagaaatgcatagagatcttcatattttgcttgttttga

SEQ ID NO: 61024 - DNA, 463 bp, Homo sapiens
actttttttttttttttttttttggccttttttttttttttttttttttttttttttttttttttttttttttttttttttttaaaaaaaaaggggaaaaaaaattttttttgccccccccaaaggggggggggggtttttttttatttttttttttttggaaaaaaaaaaaaaaaaaaaaaaaaaaaaaccccggggggggggttttttaaaaaaaaaaaaaaaaaaaaatttttgggggggggggggccccttttttttttggggggaaaaaaaaaaccccccccctttttccccctaaaaaaaaaaagggggggggggggtttttttccccccccccaaaaaaaacccccgggggggccccccccttttttggagaaaaaaacccgggggaaacttctaaaaaaaaaaaaaaaaaaaaaaggtttttttttttggcgccccccccccccgggggggaaaa

SEQ ID NO: 61025 - DNA, 529 bp, Homo sapiens
tccaccgcggtggcggccgagtacataagagaacaatgctgtaacagacagagtaatatataattggtctctctgggtatctgaatcttctaacatcaattaaaaaagtaaggaatgtgaacagagttgcacaaagacaaaatattgaaactgttccaataaaactttttgcaaactctagctcatcacttttaaaatacatgttggggcatggaggcgcacactgatcaattcccagaaacttatatccttgtcccccagaagtcttaagatgccttggacaccaaaatccaatgtctctttggacttgttctgttttcttctgaggaccaagaaattctgtgtgtggatcaaaagttacaggaacagtctcatcacagtattgtaatctgtaaagattataaaaattaaatatatgaaatcaatatttttattgattcaatatattaagcaatgctttccaactataaaatattaccttatgtattcatgattgatgggaagagatacaaatctaaatggattacag

SEQ ID NO: 61026 - DNA, 177 bp, Homo sapiens
tccaccgcggtggcggccgccactgctggttttgcatcttcaggacacgctcatatccctctcgcttttatctcagccagttcacggaaaagaggggctcacgccttccagagccacatcatttgcggtgcagaaataaaagcccccatagaggtaggtgtaggagtgcctgcatgt

SEQ ID NO: 61027 - DNA, 375 bp, Homo sapiens
  misc_feature 101, 105, 108, 119, 120, 121, 122, 139, 140, 141, 146, 147,148, 149, 150, 151, 152, 153, 154, 164, 169, 197, 212, 238,271, 290, 310, 366, 375: n = A,T,C or G
acactgaaagctcagacttcaccactaagtaatgtatccagataacttcacttgttacccctgaatctgttttttcaaaaaatcaaggcattttttaaatntttnccnaggtttttttnnnnttttcccaaaaaaaaannnatggnnnnnnnnngtcctaaatncattnctccctttttgttttcacacccaacagncattggtataaattnattaatatttaaattccaattatatnctttccaagggtaatggtctaccattaaatagncaatttttattttaagganggttgccaacacagagcctnagccaagttaaattggacatatttaagaatttcttaaaatatatttttggaccttnccttttttn

SEQ ID NO: 61028 - DNA, 525 bp, Homo sapiens
  misc_feature 39: n = A,T,C or G
tccaccgcggtggccggccgcccgggcaggtacgcgggngaataaagtgtggaacagagcgcctcattctgataacatgcaatcataaaaaccatagggcaacttggagttaaggagtttctagaatttgctttagtctccaactgcaattctttattgatcatgaaattgttgaagagaaacacaaatgtcagttttacctttcctgtgggcgtgaaagcacatcaaagtttcaggcaactgttaacatctctaccatctgtctgagttgagatttcaggttgtgacacttgccgtgacttatttgtaaatgacattttgtgtgtcttagatactaatggaattcatattctggctagttctttcagtgcatttgtagacatgttcttttcctttgtagcagtcctccctcgccctgaaatgttggtgttctaaccgatttctaatgctaatttcaactggaagcactttttcaagcccagctatcaaaccacaccaaacatgtatggattcgggttgcccaat

SEQ ID NO: 61029 - DNA, 158 bp, Homo sapiens
actttttttttttttttttttttttttcaaaaattttttttgggggggggggggtttttttccggggtcccccccgggggaaggcaaaaaaaaaggggcttttggggtttttgaaaaacccccatttgccaaaaattttccaaaagccccttgggggg

SEQ ID NO: 61030 - DNA, 564 bp, Homo sapiens
acagtgctatagctgaaaagtaataggctaggctatctgtatagcctaagtgtgtaacaggctatatacatatcatcagggtctgtgtaagtatactctgtgatgttcatacagtgatgaaatcacccaaagacacatttctcagaacgtagccccatcatgaagtgacgtgactaccagagatttctggaaaagcactcccaaaagtaatgagatgtgtatggcaatgttaactgaacctgtttgtattaaaaagtaaatccctatgaggaatgtggaaatgtccgtcaaagcattgtcttttaagtaagttccaagatccatgaattaacagaggcatatatttaaaatgaaatttaatgagcacttagtgacttcatttgttcaagaatatttgatttcctattgtgtgcatgggaggtttacaaaagacagactgtccctatgcttgtgcagcttacaatctatttaactattagaggccctgtgagatgtaggcagttatttacagatgagaaaactaacacagcagtggcaatgctgggaatggccaacaggcttgga

SEQ ID NO: 61031 - DNA, 598 bp, Homo sapiens
  misc_feature 1, 6, 105, 174, 286, 336, 344, 346, 365, 372, 379, 397, 430,450, 452, 456, 464, 489, 491, 498, 501, 505, 507, 521, 530,547, 563, 580, 583: n = A,T,C or G
nagccntttctgatcgagatcctgggggaggtgatggatccttccttcatgtgcttgaaaattggagcctgcccctcggcccataagcccttgttgggaactganaagtgtatatggggcccaagctactggtgccagaacacagagacaagcagcccaaatgcaatgctgtcnaccattgcaaacaccattgtgtggaactagggaaggaggaatattccatcttggcagaaaccacagcattgggttttttttctactttgtgtgtctgggggggaatgaaacnccacagaatcttggttttgacttttggtttaataaaaaaaattaaggggnttcccccnanccttcccccccaattttcntggtggnccctttntatttgggaagccatttnggcttgttcttggcaaaggggaagcccccttancccccttggccaaaaacatnancctnggttttcnaattggccccccttttttttttttntngcttaanaantggnantgttttgtattgcnaccttgggnagggttccttttttaancccttgccccttttgncaatttggggccgcccnttncttttgaaaggaaag

SEQ ID NO: 61032 - DNA, 478 bp, Homo sapiens
gcggtggcggccgaggtactttttttttttttttttttttttttgggttttttttttttttttttttttttttttttttttttttttttttttttttttttttttttttggggggggggggggccccccaaaaaaagggggggggggaaaccccaaaaaaaaaaaaaaccgggggggggggggaaaaaaattttcccaaaggggggggaaaaggggcccccccaaaaaggggggggcccccccccaaaaaaaaaaaaaaggggggggaaaaaagggggccccccaaaaaaaaaatttgggaaaaaaaaagggaaaaagccccccttttttcccccaaaaaaaaaaaagggggggggggggttccaaaaaaaacaggggcggccccccccaaaaaaaaaaaagacggggggcccccccccctttttttttaagaaaccccgcaaacatgccccccccccccccacaaaaaaaaaggggg

SEQ ID NO: 61033 - DNA, 442 bp, Homo sapiens
aaagaaatgcaaatagcaatctgaagaaccactgctgcaggtggtggccctggctagactgaattacactagaaatcagccagaaggaagcgtccttgggatcccagatcactctttttttttttttttaaaagggggcagcccctggggggctaatccctttagaataacatgaccgttttcttttcattcccagatgcctttttgttcatgcctttgaaccccctcacccccttaagaaacttcccaccctttgtaaaattcatttccccaaaaccaggggggcccttttggcaaaaagggttgccctccaggcccaaggggactttacaaagtgtttgacctcaacacactggattccggggggcctggaccaaaaccgggcaaaaacccgggaactgaaaacctccacggggttgggaaaataaaaataaaacccccg

SEQ ID NO: 61034 - DNA, 294 bp, Homo sapiens
  misc_feature 282, 283, 284: n = A,T,C or G
ctccccgcggtggcggccgaggtacttttttttttttttttttttttttttttttttttttttttttttttttttttttttttttttttttttttttgggggaaaaaaaaaattttttttttcttccccccggggggggggaaaaaaaaaaaaaacccccccctggggggggggggggggggtttaaaccccccccttttttgggggggggggccccaaaaaaagggggggggaaaaagagttttttttgggggggggggaggccccccaaaaaaaaaaaannncccccccccc

SEQ ID NO: 61035 - DNA, 546 bp, Homo sapiens
acgcgggttcaagaaagacatttagacagtatggaaaagttctgattccagtgcatctaataacttctggtgtttggtttggaacattttattatgcagccttgaaaggagtgaatgtcgttccttttctagaactcattgggttacctgacagtgtggtaagcatcctgaaaaactcccagagtggaaatgccctcacagcatatgccttgtttaagattgcaacacctgctcggtataccgtgactttgggaggaacatctgtcactgtgaagtatctgcgcagtcatggctacatgcccacgccgccacccgtcaaggagtatctgcaggacaggatggaagagacaaaggagcttatcacagagaaaatggaagaaacaaaagatagactcactgaaaagttacaagaaaccaaagaaaaagtttcctttaagaaaaaagtggaataaggtgccttatatagcagtatagaaaattcctgcactttaaccctttggaaactatgggcaaagatacatgtgtctgattatttttttggttagt

SEQ ID NO: 61036 - DNA, 474 bp, Homo sapiens
  misc_feature 2, 445, 457, 467: n = A,T,C or G
cnttgcaaaaatccctttccggggggctccttgtagtgacgctgcaggacgtcaggtgccctacaaaacgatcatgaagcaaataaatagttctatttctggaaacctatgggataaagatcagcgggctccttattataactataaagtaagacttttcgtaagttatgagcatttattctattagtttttgtaattattttcataattagatgtttgatatcaagaatttctatcagttttcttttagggcataacatgcagactgctatttacatgagtaaacttgtctttgaatctgtaatcaggaactttagttccctggcgagcaattggagttttgctaatggtgaatctactctgcttgggcccccttgtcatttaaatgatgcccttaaaatgtgcatatcacaaacaggatttctgtaacagttgacaattatgntaagatgactgntgatttgaangggtttg

SEQ ID NO: 61037 - DNA, 300 bp, Homo sapiens
  misc_feature 285: n = A,T,C or G
tccaccgcggtggcggccctagtacaatcagggctccatatgtgtggatgcaactaactgcggactgaaaatacccgtgaaaaaaataggtgggccctgaacctatacagactttcctctagccatggttccctaagcactacacgaagacaactatatacatagcatctacattgtattaggtattggaggtaatctagagatgatttaaagtatatgggataatgtgtgtaggttatatgcaaatactgtgtcattttatatcagggacttgagcatccatgngatttggtatccttg

SEQ ID NO: 61038 - DNA, 474 bp, Homo sapiens
actttatggaattctggttcttggtgatatttggagttcagatagtggatttatagtgggaaagaggattttgaatatagagatagtagaactagggaatgattttttaaaaataaaaggtaaagaacagaataggccgggtgcagtggctcatgcctataatcccagtgctttgggaggcccaagagggggaattgcttgaggccaggagtttgagacagcctggccaacataaagagaccccatctctacaaaagttaaaatttaaaaattagctggtcgtggtggtgcatgtctgtaatcccagcaactcagaaggctgaaacaggaggatcacttgacaccaggatttcaaggtcgcagtgaactgtgattataccactgcactccagcctgcctgtttctaacttaaaaaaaaaaaaaaaaaaaaaaaattccttgccgggggggccctttaaaaactagggaaccccc

SEQ ID NO: 61039 - DNA, 539 bp, Homo sapiens
actttttttttttttttttttcccctgacccaggaattggggaaaaaaaatccttccgggaagggtttctttcccttggaagggtattttttccccccccttcaaaaaccttaaaaaagggccaaaaaattttttccaaattggcttttttaaaaaagcccttttttttttttttaaaaaagggtttggaccccctttccccttttttttaaaaaaaaaataatccgggttgggttggttaaaagggcccaaaacttaaaaaaatttaaaaagggtttttttttatttcccaacaaaattttttttaaattttttggaaaattttttttaaaacggttttttggcgaaacccaagggaaacaaaaaaaaaaaaaactcctttcccccctccatttttgtgaaaaattccctaaaaaatttttggaattgccaatttaaaattatggccgccggttaaacctttttttttcggcccacccttgggtttaacaaaccaaaaaattttaggccacccgaacctatttttttttattaatccc

SEQ ID NO: 61040 - DNA, 299 bp, Homo sapiens
ctccacccggtggcggccgcccggcaggtacttttttttttttttttttttttggggggggaccccttttgggaagggggcccctttttttttgccctttcccccgggggaaaaatttttaatttttaaaaccccccctggttttcccccccccaaaccaaaaaaccgggggattttaattgttaaaaaaaccaccctttttttcttttcccccccttgggattcccctacccaacatggggggggaaaccccttattggaaaaaaacctttaaaaaaaatggccctttttcccctagg

SEQ ID NO: 61041 - DNA, 200 bp, Homo sapiens
cgcggtggcggccgaggtacttttttagtgcttattttttcaagaagggtcggaggtcagggcgagcgtctcgcaggctttatgaggaagaggcggtggattcgcgcgttacccaggaggaaattatgaaggatccagagaaacctatcgaccgcgagaagacagctttttgttgttattggtcttcaccaccattttct

SEQ ID NO: 61042 - DNA, 308 bp, Homo sapiens
ctccaccgcggtggcggccgagtacttttttttttttttttttttttccaaaaataaattaaaccggtttttaaaattttgggaaggggggggggcccccaataaacccccccaggtttaaggggggtttttaaaattttgggaagggggggggccccccaaaaaacccccccaggtttaaggagggttttttaaataaaaaaaattttcccttaaaaaaaaaggcttttaaaaaaaaaaaaatttttaaatttcccggtttaaaaaaaaaaaaaaacccccccaaaaaaaaaaattttaaagggggg

SEQ ID NO: 61043 - DNA, 319 bp, Homo sapiens
tccaccgcggtggcggccgagtactttttcttttttttttttttttgctttttaaaacccccggggaaccccttcccccttaaaaagaaaatccccccttcaaatcccaaccaaagggcttttaaaaaaatttttgggaatccgaaaaattttttgaaaaacttttcaaaaaagggtttttttttcccccagggctccccttaaaaaaaaattatttaaattaatgggaaatttaaaaaacccccctaaaaaaaagggtttttaaaggcccccctcaaaaaaaaatttttttttcccaccaaacccctaaaattggggg

SEQ ID NO: 61044 - DNA, 293 bp, Homo sapiens
acatgactgatgtttctgtgattatcacagttgaaatatttcagccaagatgcacattacttcaaagctgctcatccttggttttcctaatttgtatactgaccatgactttactaatttcctggaacttctgatggttctgtcttttatgtagttgacagtccttagatttgccacactcgtcacaagagtgtgtttatatttttttgtgtctgtgtgagcatagatgggcatctttagctcacccgcactcccaccactcgtttccctatgggaaaaggtagttttttgcc

SEQ ID NO: 61045 - DNA, 282 bp, Homo sapiens
actttttttttttttttttttttttttggaaggggggggttaaattttttgcctaaggggggtttaaaaccctagggtaaaagaaccccccccccttggccctctaaaaagggggcataaagggtttcccccaccaccccaaggggtttttaataattattcccaatttttttaaaagtttaattttttataaccaaacctttttttttccaaatccccttggggaaaaaatttttttttttgaacttttttttttaaaaataacaccggaatttttgcccc

SEQ ID NO: 61046 - DNA, 436 bp, Homo sapiens
actttttttttttttttttttttttttttaattaaaaaaattaaattttttggggggggttttttttgcattttaaaaaaaaaaattttttaaacccccccccccatttcccaaccgaaaagggccctggcaaaaaattggcaaattttccccccccccttttaaaaaatttttaaaaaagcccttttttggaaaaatttattttaaaatttgggcccccaaaacttttttaaaattttcccggaaaaggcggatttaaaacaaaattttttttttttttttcctcccggggggggctttttaaaaattggggaccccccgggggggggaaattttttttaaatttttttaaccccccccccccggggggggggcccggcccccctttttttttctttttaaggggggtaaattcccccctggggaaaaaaaggga

SEQ ID NO: 61047 - DNA, 316 bp, Homo sapiens
  misc_feature 16: n = A,T,C or G
tccaccgcggtggcgngccgaggtacaggaagtgtggcacaggcatttgcttggctcctggggaggcctcagggagtttttgctcatggcagaaggtgatgcccacacactttaaaaaaaaaccagatctcatgaaaactcactcactacactgaggacaatacaaaaccatgagggatctgtccccatgacccaaaaacctcccgccaggtcccaccaccaacattgggaattatatttccacttgagatttgagtggcgacaaatatccaaactatatcagggctcatgtccagttatatgtcaacatgcctgc

SEQ ID NO: 61048 - DNA, 620 bp, Homo sapiens
  misc_feature 44, 591, 592, 593, 602, 603, 604, 605, 606, 607, 608, 609,610, 611, 612, 614, 615, 616, 617, 618, 619: n = A,T,C or G
ggatatcgtcatcatggtacatcactctgttgtgcctgaatggnagctccaccgcggtggcggccgaggtacttttttttttttttttttttttttgattttttttttttttttttccgggggaaatttttttttgggaaaaaaaaaaaaccccccccccctgtcccttttttaccaaaaaggggacccccccaaatttttttttttttttttttttaaaaaaaatttttttaattttgcccccaaaaaccgttttgtttttaaaaaaccccttttaaaaaaacaatttcccccctttaccccaaaaaaaacccccttaaatttggggaacccctttttttttgggggccccccccccccctgggggaaaaccccttttttttttcccccccatttttttttttccccccaattggggcctttttttcccccccccggggggccccttaaaaaaaaggggcccccccggcccggggaaatttaatttaaccttttttaacccccccccccctgggggggggcccccccccccctttttttcccctttaagggggggaaaatcccccccggggaaaaaaaggggaatggtgnnnccccggggnnnnnnnnnnnannnnnnc

SEQ ID NO: 61049 - DNA, 472 bp, Homo sapiens
ccccgcggtggcggccgaggtactttttttttttttttttttttgggggggaaaaacccccgggcaaaaacttttttccccggggggggaaaaatggtttcccaacgggctttttcaggttttcccctttttaaaaaaggttctttttacggcccaaggcttttttccacccccttattttggggccctatgttttggggggtttttttcaaaattttttcccctggggggggggggggtaaagggggggccttaaaaagggggcccggggggttaaacccccccctccccccgggttaggggggccccccgggccccctttttaaccccccgggggccctttttttttgggaaaaccccccgggtttttagggggggttgggggggattttgaaaaacccctaaaaagggggggggggaaggtaaaaagggggggttttttcccaaaaggggggggggggtttgggttttt

SEQ ID NO: 61050 - DNA, 126 bp, Homo sapiens
acttttttttttttttttttttttttgggggggcccccccccctttttttggggggtggggcctttccttgtttttaaaaaggccaaaaaaatccccccaaaaaaaaaaactttgggggtaaaaaa

SEQ ID NO: 61051 - DNA, 282 bp, Homo sapiens
actttttttttttttttttttttttttttttaagccttaaaagggggaaaagggggtcttttggggaaaaaccgccccttttttaaaaattttttggggaaataatttttagaaaaaggggctaaaaattgggttttcccccaaaattttaaaaattttccccgtatttcccccccggctttttacgggaaaaagggttttgtttaaaacccccggaaattcctttttttttaaacccaatggggggacccctttttaatcccaaaactttttttaattaat

SEQ ID NO: 61052 - DNA, 321 bp, Homo sapiens
ctccaccgcgtggcggccgcccgggcaggtactttttttttttttttttttttgaaaaaaaaagggggtttcccctttttaaccagggggggccaaatttcctaaccttggaattccccccctttggcccccaaaagggggggaattaaagggggaaaccatttttggggggcggttttaatttttggccccctttttttttgggttttaccccttaattgaaaattttttttttaaggtttgggaaattgggggctcccccttttttttaagaaaaaaattttaacctttttgaaacctttgggtttttccccccatttt

SEQ ID NO: 61053 - DNA, 311 bp, Homo sapiens
actttttttttttttttttttttttttgttttttggggaaaaaaaaaggttttccctttttccccaggggggtttaaaacccgggggcaaaaaaaacccccccccccctcccccaaaaagggggggaaaaaaggggggaacccaaaaccccggccccatttttttcccttaattaaaaaactggggggggttaaaaaaaaaaccccccccccaaaaccttttaaagggagggccccttttttttaaaaaattaaaaaaccgcccctttttttttccccccccaaaaaaaaaattcccctttttgggggaag

SEQ ID NO: 61054 - DNA, 293 bp, Homo sapiens
actttttttttttttttttttttttttttttcccccgaaaaaaactttttttcaacccccgggggttttaaaaaaacctttttttttttttttcctagggccttttttaaaaggtttaattttttttttaaaaatttaaggctttaaaaatcccggaaaaaacttacccccaaaaatttttttaaaaccctttgggttttttttttaaaggggggggtaaaatctttttttttaaaaaaaaaaaaaattttttggggggttctaaaagcccccgcgccccccaaaaaaaaacc

SEQ ID NO: 61055 - DNA, 257 bp, Homo sapiens
tccacgcggtggcggccgaggtacttttttttttttttttttttttttttaaaaaatttttttttttttttttttttttttttttttttgttttttttttccccaactaaaaaaacttttaaagaggggaaaatccccccccggcaaaaaaatggttttatctgaatcctggggaaaaaattttttttggggggaaaacccttttttggggaaaaaaaaaaaaatttttttttttggggggaaaataaattgggggg

SEQ ID NO: 61056 - DNA, 300 bp, Homo sapiens
acaggaatttggcttacacaatgagaacttggaacagaggctggaaattaaacgtatcatggaaaatgtgttccaacacaagttaccagattgttccctaagattatatgggtcatcctgtagcagattgggtttcaaaaattcggatgtaaacattgacatccagtttccagccattatgtctcagctagatgtcctcttacttgttcaagaatgtttaaagaacagtgactcctttattgatgttgatgcagacttccatgctagggtgccagtggtggtgtgcagagaaaagcaaag

SEQ ID NO: 61057 - DNA, 286 bp, Homo sapiens
acttttttttttttttttttttttttttgggttttttggttgggtttggttttggttttgtttggcccccccaggggttttaaccaattaaaaagccttgccccccaaaatttggaaaatttctttgggttttcccccctcgggaaaaaagggggaaaaagggaaaccattttaaaccccccacctttaacaaaaaaggtttagcaaaaaaaaaaaaggccccattttttttaaaaaccggggggtttaagggggggggggaaaaaaaaacccgggggggggaatt

SEQ ID NO: 61058 - DNA, 128 bp, Homo sapiens
actttttttttttttttttttttggaaaacaattttatttttgccccccgggtggaattaaaggggccaattttaagttacttccttgaaccttttgtttcccagtttaaaaaaagttttttgcctaa

SEQ ID NO: 61059 - DNA, 232 bp, Homo sapiens
acaaaatgaacaaagtttaagtttagaccaaaaacttattgcaatcttttgaaaaataacttgattattattttaccctcttacactaatttacatttatacaaattttaattaaacatactagattgaggtgctaagaatgtttgaactatctacatttaaagttactgcactatgattttataaatccaaatttaaaaggaagatactttagtgaataacggaatcctct

SEQ ID NO: 61060 - DNA, 541 bp, Homo sapiens
acagaaaatagaatgggatactgaaacacctggattggttacagctgggtgtcttatttgaacaaggtttgagtagttggctgtctgtgaatgctaaagtatggctgctgtgattggctgagactctgctacttacaagagtaggttgctgtctatttacacaccctgttaggttacagttcactatatacatataaaccatcaggcctaacttaaaatgtgtaaggagtcagctttaggcaagtttaattaggcatggtaaaagggtcacttcaccaagaaaatttagcaatcttaaatgcatatgcagacaacagagctgaaaatatccaagcaaaacctgatggaactgaaaggagaaatagacaaatcttcaattacagttaagactccagcccttctttctcaacaattgatagaacaactaggctataagtcatccaggatatagaaaaactcagcaccatcaaccaactggatctaatcaacacttagagaacattcctttcaataacagcaaaaaaaaaaaaaaaaaaaaaaa

SEQ ID NO: 61061 - DNA, 468 bp, Homo sapiens
acttttttttttttttttttttgaaaaaaaaggggggtttttttttttcattcgggtttgggggccaagggtttcttggaccttttttttcgggggtttagggaatccccccccccccccctttaaagttgtgggaataaaaaaattccctttttgggccaaaaattttttttttttttttttaaaaaaaaaattttttcttttttccccggggggggatttttggggttaaaaaaaaccccttttctttttttttaaagggggggaatttaaaaaaggacccccctttcccgggcctttttttttttggaagggggctttaaaaaaattattttggaaaaaatttcctttggaaaaaaaatttttttttttaaaaaaccttttttttatggggtttccccccggggaaatttttttaccgggaaaaaaaaaaatttttttttttaaacaaaaacctttgggggggtt

SEQ ID NO: 61062 - DNA, 282 bp, Homo sapiens
acttttttttttttttttttttttcccccctaaaagagggggaaaggggggtcttttgggaaaaacccgcccctttttaaaaaatttttgggggaattaattttaaaaaaaagggccaaaaactggggttttcccccaaaatttaaaaacttttccccttttttcccccccgtttttttacggaaaaaagggttttttttaaaacccccgaaatttcttttttttttaaccccaagggggggaccccttttaaatccaaaaaccttttggaatttatttttt

SEQ ID NO: 61063 - DNA, 299 bp, Homo sapiens
actttttttttttttttttttttaccttttaaaaaaaaatttttggtttttttcccttggggcctttttttgtaaagtggggggaaaaaatttttaaaaaaatgtttgcccccagaaattttttattttcccattgggggcgggggaaaaaatttttggaaaccccccgggtatggctttggaaaaacctaaaagaactttgcccctttgggggcccttaaaggggtttgggaggggaaaaaccccccctttaataaggaaataaaaaattttttttttgggaatttttttgcggggtt

SEQ ID NO: 61064 - DNA, 258 bp, Homo sapiens
acttttttttttttttttttttttttttttttgggcccccccgccaaaagggaaaggggcaaaaaaaataaaaggccccctttattttcgggggaaaaaattttcccccccttaaattttttaaacccgggggaacaaaagccccccccccctttccaaggggggttgggggttttttttggggggtttttttttttttttgggggggggggttaaaaaaaaaaaaaagttttatttttttccccagggttattttaa

SEQ ID NO: 61065 - DNA, 285 bp, Homo sapiens
acccagagttgtccctttaaaagtccacagtggcactgccaacttctaccgcagctgcctccagccacacagtcctcccctgcatgctgttatactcagttatcaggtagcatcctgctgcctgctcacgtttatcacagagtttcagtctatcctctggacattatccagacactacttacctatctttactatgaaactgagagttctgtaatttttttccaacatacacagaacaaaatgggataattagcattctattctgttaactacattttatcttac

SEQ ID NO: 61066 - DNA, 602 bp, Homo sapiens
  misc_feature 33: n = A,T,C or G
taccgcgtactagtacatattgagtgcctaatnggactccaccgcggtggcggccgaggtactttttttttttttttttttttgggtttgaaaacagggggtatcctttttttccaaattgggaggggccaaatttgagctaaatgaaaccccccccttgggggaaaaccccttttctcttcccaaacccttaaaaaaaggggaaaaaaaggccccccccaacaccccaaaaaaattttttgttttttaaaaaaaaaagggccccaaaggtttaaaccaagagggccccaatttccaaaccttgaaaacccccccatttggcccccaaaagggggggaattttggggaaaacccccccccccgggcccaaaaaaaaatttttttaaaaaaaaaaaattcccaatttttggccttttaaaccccccaaaaatttttttaaattaaaaatttggggggaccccccccggggggccctttaaaaaaaaaggaaccccccgggccggaaaaatttaatttaaacttttttaaacccccccacctggggggggggccccgcccccaatttttttcccttttaaaaggggtaaaatccccccctggcc

SEQ ID NO: 61067 - DNA, 240 bp, Homo sapiens
  misc_feature 17, 27: n = A,T,C or G
tccaccgcggtggcggnccgagtactnttttttttttttttttttttttcggaaacacccccccggggggggagggggaaatttgcccccccggctcctttcttggaagggggaaccctttttaaaggccccttttcgaaaaaaaaacctttatatccccgtaccccgggggcaacatgggggggccgggaaatccccttaaaagtttaatggggaaaactttaaatggggtcccccccc

SEQ ID NO: 61068 - DNA, 401 bp, Homo sapiens
actggggttaaagttgggtcccgtgcaaacttcacttcccatgtgctaacctgggcaatatgactatgagggaatagggcctttttggatgtgctcaactgactcaataaatcactcgcggatcatggtggctctgaatttcactgtgactggaggttttacaagatagagatttggacagagatacctacagagagaaggccttctgatgacacagggagggtctggagtgatgtgtctataagtcaaggaacaccaaagatttgctgacaggcaacacaagctaggaacaggctatgagggattctcctctcgagcttttagagggttcacggcctctcaccatacctttggttcagacttctggccctcatgactattagaaaatgctcttctgttgt

SEQ ID NO: 61069 - DNA, 307 bp, Homo sapiens
cccgcggtggcggccgcccgggctgttttgtttttttttttttttaaaaaacccggcccgcccgccccccaaaccaaaattttttaaaaaaaacctttggccccccggggttttccccaaaaaaaaggaaccccctgggggaccaaaaaaacggggggggaaccttgggggcttttttttttctttttttggaaaacgggaaaccccccaaattttctttaagggggaaaggggaaaacaaagggggggcccttccccccgggggatcccccccccccaaaaaaaaaaaaaattggggggaaaaaaa

SEQ ID NO: 61070 - DNA, 379 bp, Homo sapiens
acttttttttttttttttttttttttttttaaaaaaaagaggggtcctttttttccccccgggtttttttgggggggggggcccttattagtctcctgaccccccaactttgggggcaaaaaaatttttccgccccaaccctttgaaataaaggggtggcccccccccccctggatattttttacccttttaaaaaaaaaaaagtttttccgttttcccccaggttgcccccttttttaaacaaaaaaaaccttttttttttccccccggggtttttttttttaaaaattttaaaaacccccccttccccctttttttttttttttaaaacccaccaaaattaaagggggggaaaaaattcccttcccagaaccaacct

SEQ ID NO: 61071 - DNA, 383 bp, Homo sapiens
acttttttttttttttttttttttgggaaaaaaacctggggccctttaggggggggatttttttttttttcccccccaaaaaaaatttttaaaaagggtaattcccccttacctttccataaaaaaaaacccgggggggggttttaaaaaaaacccttggaagtttggggggcccccctttttgccccgggggtttataaatttaaaccatttaaaattttttttcccccccccgggccttaaaagtttttttttaatttaaccaaaaaaaaactggcccccaaataaccccgggggggtttttttcccccaaaaaaattttttttggggggaaggggggaaattggggggtccttttttaaacccggggggggcccccattt

SEQ ID NO: 61072 - DNA, 237 bp, Homo sapiens
actttttttttttttttttttttttgccttttttttttttttttttttttttttaaaaaaaaaaaaccgcgctttttttttccccccccccttaaaaaaaaagagggggggaacccccctttttttttttttaaaaaaaccgggttggtgggcccccctggggggcaaatttcccccttttaaaaaagggggggggtttttttttttccccccccgggagaaaaaaatttttggggg

SEQ ID NO: 61073 - DNA, 259 bp, Homo sapiens
acttttttttttttttttttttttacccaaaggaaaaacccaaaacataattcgaacccccctttcgaaagggaaaaggggggtcgggtggtccttttttagggggaaaaaaaatattttttggcccagggtttttaaggccagaataaacaaagggttttttttttttgaaaaaggggggaaaagttaaaaggcccccttttttataattgttaaaaaaaaaggaaggcctgggggacttcttaaaaaaattttgggg

SEQ ID NO: 61074 - DNA, 539 bp, Homo sapiens
tccaccgcggtggcgagcggccgcccgggcaggtactttttttttttttttttttttttttttttaaatttttttttcccccccccggattttttttttttttttttttttccccccccccccccaaaaaaattttttttttttggggggggttaaaaaaaggggtaaaagggggtaaaaaaaaaaaacttccccccggggggggggaaaagggggtttaaaaacccccgggggaaaatttttttaaaaaaaagccccccaaaattttttaaaacccccccccttttaaaaaaaaaattaggggggggaaaaccccctttttttaaaaaaaaaaaaccccccccttttggggaaaaaaagggggggggggggcccccttttcaaaatttttttaaaaaaaaatttttcccccaaaaaaaaaactttttccccccccccggggggttaaaaaaaaccttttttttctcccccccccgcgcccctttgaaaggttttaatttttttttaaaaaatttggggttaaaaaaagcgggaaaaaa

SEQ ID NO: 61075 - DNA, 221 bp, Homo sapiens
actttttttttttttttttttttttccccccctaaaaaaaaaaaatttttttgggtttttgtttaaattggggggggggttttttggccaaattattttttttggggacctttttaaagaaattttttttttaagtttttaaaatttcaaaccccaaaattcccattttttttttttttaaaaaccccaatttttttttgggcctttctttctggaaaaaa

SEQ ID NO: 61076 - DNA, 283 bp, Homo sapiens
actttttttttttttttttttttttggaaaagaaagaatttaatttttttccccaaagggggtttaaaaacctttgggttttaaaaaggggggggattaaaaaaaaccccccccccccccccaaaaaactttttaaaaactggggggaaaaattaaaaaaaaactttttttttttaaagaaaaactttttttttttaaaaaattaccaaaaaaggtttttgggccccgggggaaaaatccccccaaggaaaatttttttttttccaaaaagcccccaaaaaaa

SEQ ID NO: 61077 - DNA, 223 bp, Homo sapiens
cgcggtggcggcccgagtacctttttttttttttttttttttttttcccccccctttttaaaaaaaaaaaaatgcccggggaaaaaaaaacaccaaaaggggtttttggggggggccgggttccttttccggggggggttggaaaacccgggttttcaagggcctggtaaaaaaaaattttttttcgggggggcccggccccaaaaaaaaatttttttggttt

SEQ ID NO: 61078 - DNA, 595 bp, Homo sapiens
  misc_feature 422, 423, 432, 433, 434, 435, 436, 437, 438, 439, 440, 441,442, 443, 444, 445, 446, 447, 448, 449, 450, 451, 452, 453,454, 455, 456, 457, 458, 459, 460, 461, 462, 463, 464, 465,466, 467, 468, 469, 470, 471, 472, 473, 474, 475, 476: n = A,T,C or G
  misc_feature 477, 478, 479, 480, 481, 482, 483, 484, 485, 486, 487, 488,489, 490, 491, 492, 493, 494, 495, 496, 497, 499, 500, 501,502, 503, 504, 505, 506, 507, 508, 509, 510, 511, 512, 513,514, 515, 518, 519, 520, 521, 522, 523, 524, 525, 526: n = A,T,C or G
  misc_feature 527, 528, 529, 530, 531, 532, 533, 534, 535, 536, 537, 538,540, 542, 543, 544, 546, 547, 548, 549, 550, 551, 552, 553,554, 555, 556, 558, 559, 560, 561, 562, 563, 564, 565, 567,568, 569, 570, 571, 572, 573, 574, 575, 578, 579, 580: n = A,T,C or G
  misc_feature 581, 582, 583, 584, 585, 586, 587, 588, 589, 590, 591, 592,593, 594: n = A,T,C or G
tatcgcgattctgcgtacttcactttgtggcctagatgggagctccaccgcggtggcgaattatctagctccaaatgttaatgatgctgactttgagataccctagtcagaagtaacatttattggccaggggcagtggctcatacctgtaatctcagcactttgggaagccgaggtgggaggatcacttaagcccaggactttgagaccacctggacaagaccctgtctctgcaaaaaaaaaaaaaagggggggaaaaaggccccccgccccctttaaaaaaaaggggcccccccggggcggggaaattttatttaactttttttaaccccccccccccgggggggggggcccgccccccttttttttcccttttaaggggggtaaaaccccccccggggaaaaaaaggggtaaatttttnnccccggggnnnnnnnnnnnnnnnnnnnnnnnnnnnnnnnnnnnnnnnnnnnnnnnnnnnnnnnnnnnnnnnnnngnnnnnnnnnnnnnnnnngcnnnnnnnnnnnnnnnnnnnnncncnnngnnnnnnnnnnncnnnnnnnncnnnnnnnnnggnnnnnnnnnnnnnnnnna

SEQ ID NO: 61079 - DNA, 466 bp, Homo sapiens
actttttttttttttttttttttttggggggggggggaaaataatcttaaaattttggggttttttccccaaaccgcccggtttttaaaaattttaaaccttcccccttgggggggcccccccccaaaaacccgttttttaaaattagggttttttttaaagggtttttttccccccccccccccccccaaatttttttttttttttccaaccccccccttttttggaaaaaaattaaaaaaaatccccgtttgaaaattttaaaaaaaaggaaacggggggaacaaaaaaaaatcccttttaaagggggggggtttttaatttaaaaattttgggtttgaaaaggggggaaaaccccccccggggggcccttttaaaaataagggaccccccgggccggagaaatttaatttaaacttttttaaaccccccacccctgggggggggcccggcccccaattttttt

SEQ ID NO: 61080 - DNA, 556 bp, Homo sapiens
acctgcccaaacacaattatggctacatcatggtaaaggaaatgccttaacagtcttagttgcaggtagcctcaaactgggcaatgccaccaatgctactttccccagcattcctccctgtgctaaagaacaaagccaagaaagtaatggattccactttggctgggaggtctgtcttgggggacaagcccgtagcctccagttaggcaattataacatcttagactggagctcccacagccatttcagggtgatcatactgatgtccgcgtctatcatggcatcaatgacagtttcgtagccacgtcctgctcccctataatttgggccgatagggtaatggggtatcccagaccccaagtagagtccatgccaccccaagacactttatggtgcctgggacatcttagcacctcccttaacacctggcatgggacatataattccagtcacaattacactatgacattttttcataatcacactgatcagtgcctgatttgcactacccaaccatatgtttttccttatggggaaccacatatttccattacat

SEQ ID NO: 61081 - DNA, 228 bp, Homo sapiens
acaagcttttttttttttttttttttttttttttttttttttttttttttttttttttttttttttttttttggggggggattattttttttttttacttttctgaaaaataaaatgtggcccccacagtatattttatgagtattttgcgacaatttaaaattttttttttttaaaccaaaacactctaaggtttttacgctcaaattctccttatgcagatcacca

SEQ ID NO: 61082 - DNA, 113 bp, Homo sapiens
taaaaatatttttattttaaaaggggagaatattttttggatttcccttttaaggcccatttttttggggaaaaattggggggtttttctttttcccaacctccttttttttt

SEQ ID NO: 61083 - DNA, 285 bp, Homo sapiens
acttttttttttttttttttttcccggggcttccctgttttttttgggggcccccccggccaggggccctccccctaaaaaaaggggtgggcccttttgggggaaaaccgggttttgttctaacggcccaaaacccgggggggcacgggaaccttttttttggattcgggaaattttttaacacccgccccttttaaaactaggggaccccccgggctgcggaatttcattttaaactttttcaaccccccccccctcggggggggccccggcccccactttttt

SEQ ID NO: 61084 - DNA, 190 bp, Homo sapiens
ttttttttttttttttagggcaaaaaaggctgcttctttgaacccctggaaatttcccttgaattctaacaaaaatggtcttcacctcgggggtattattaaaaaagaaaaccacccgggggggcccccagttggtggttttttaaaaggtattttttccctttttaaaaaccccccaaataaaaagggg

SEQ ID NO: 61085 - DNA, 295 bp, Homo sapiens
actttttttttttttttttttttggggaaaaaaaaaaaaacttttttttttttttttggaaaggggattcccccccctttttttttggttttaaagttaaaaaaaaccccctaaaggggaaaattttccccaaaaaaagggaatttttttcccaaagggggttaaagggccctttgggaattcagggggcaatccccccggggggggttaaaaaaaccttttaaaaaaaaggcccctggtttgaggggaaaatgcccgggaaacccccccccttggggggggcccccggggaccc

SEQ ID NO: 61086 - DNA, 350 bp, Homo sapiens
ggagctccccgcggtggcggccgaggtacttttttttttttttttttttttttaaaaaaaaaaaaagggttcacctttttcccccgggtttttttaaacccccgggccaaacgggtccttttcccccccccccccaaaggggggggtgtaaaaaaataaacccctcccccccagtcggatttttttatttttaaaaaaaaaaaaaaatggggcgcacagaaagggccccttaaaaaaagccttttttttataaccccgggttttttaaaaaactttttttttttgcccccttcaaaaaaccctatttttttccttatgtgaaaatccaaaaaaccaatctcttttttttt

SEQ ID NO: 61087 - DNA, 473 bp, Homo sapiens
  misc_feature 408, 409: n = A,T,C or G
acacataccacattttctttatctattcttctgtttatgaacatttatgtttcttccatcttcacaattgtgaataatattgaaataaacacgtaagtgaagatatctcttgaacatacgggtttcaattcctttgtgcatatgcttagaaggggggcctggtgtggtgatacgtgcctgtagtttcagctactcaggagactgaggtgggaagactacttcagcccaggaatataaggctgctttgagcacaccactgcactatagccttagtggcagagcaagaccctcatctaaaaaaaaaaaaaaaaaacccccggggatggggaaataaaacaaaatttttttttttaaatttggcaaaacctttttaccttttccaaaaaattgtgtccttctgccccggtnntcaaaataataaaccacatcagctatgtccacattattctgagttttttgagcccgcgtccctc

SEQ ID NO: 61088 - DNA, 372 bp, Homo sapiens
  misc_feature 342: n = A,T,C or G
cacaactacttaggggaatggtggcagcacatctattgctacttagttgaaatggcccacataacaaacatgaatggagaatttaattcttaattaccttgtcaagcatgtcacctggtgctatgtccaaagactttccaagaagcagaaaatctgaaactccttgaactaatgccaacagacagtgacctccagaaatcaaaagaactaaaaaaggaaattctactttattggtcaacctaatagtaagtgcatgagcctccatatgatgaatgggaatgaatggcttttttaactgtcctaccagctgtaagctaaatgataagcccactccccagcttnaagcaagtcctggttttatggtagttgcaa

SEQ ID NO: 61089 - DNA, 265 bp, Homo sapiens
acttttttttttttttttttttttgggttttttttttttttttttaaaaaaaaaaatcctttttttccccccggggggaagggggggggaaaaaaaaaaataaaggggccccaaaaaccggggggaaaaaaaaaccccccccccaaatccccaaaaggggggggaataaaggggaaaacccccccggggggaaaaaaggtttaaaaagggggaaaaacccggggtaaattttaaacccccattttaaaaaaccttttgggggaaa

SEQ ID NO: 61090 - DNA, 530 bp, Homo sapiens
actttttttttttttttttttttttttttttttaaaaaaagggtttttttttttcccccccggggggggggcgggggtttaatttgggtttttggccccctttttcccccgggttaaaaaaatccccccccccaaaccccctttttggggggaattttttttgcccccctttgggcccccaaagggttaaaaaaaaaatttttggaaaaagggggttttttttttttcccccgggtttttcaaaaattttggggccaaattttttttcccccttggccccccaaaacccgggggttggggggggtacccccctttttgggcccaaaaaaattttttttaagggcgggttttcccaaaattttttttttttttttttcccaaaaaacccttttttttttgggggcccccaaaagggaacttaaactttggcccccccgtttctttgccggggggggttttaaaattttgggtacccccgggggctggggattttttttttatttttttttttcccccccccctgggggggg

SEQ ID NO: 61091 - DNA, 291 bp, Homo sapiens
actttttttttttttttttttttttttaaaccaaaaaatttccagggggttttaagggggtttgggggcaaattaaaagggaaaaaaaaatttttttttggaaaacccattttacccagggcggggggggttgcccccccccccaaaaaaattccccccttttttgccaaaaaaaagggggggcttttttaatttttcccccggtcccctgggccttttaaaaaaaagggaccccccggggcggaagaattttaattaaacctttttaaaccccccccccccggggggggg

SEQ ID NO: 61092 - DNA, 253 bp, Homo sapiens
acttttttttttttttttttttgggtttaaaacccccccattttttttaaagagaaaattttcccggtttaagggttcccgggaaaatttttgggggaaaaagggtttcttttcccccattttgttgggcctccctttaaaggttgcaaaaccccccggttcaatttttccccggggccccccctttgaatttttcccccatgcctgcccccatttaatttttttcccccctgggggggggcccccctttttc

SEQ ID NO: 61093 - DNA, 321 bp, Homo sapiens
ctccaccgcggtggcggcccgaggtacttttttttttttttttttttttttttttttttctttttttttaaaaaaaaacccccccttttttttccggggttgggggaaaaaagaaaaaaggggggattgtttttaacccccagggggttttcccccggaaaaaaggggtttttttttttaaaagggggggggaaaaccccccccttttttttgggtaattttttaaaggggattttgccccccccccttttttttaccccccccaaaaaaaaaaattttttttccccaaaaaaattgttttccccccccaaaaattccccc

SEQ ID NO: 61094 - DNA, 513 bp, Homo sapiens
tccaccgcggtggccgagcggccgcccgggcaggtacttttttttttttttttttttttttggggcccaaaaagggccaaaagccaaccccggaaaaaacatttgggttttttttttgggaaaaaaaaaaccttttttccccctttggaaaaacttgggaaaacccttcccctaaaaattcttttggggccaattttttttttttccccaaaaaaatttttaaaaaaaatttttttttttccccccaaaaacccttttaacccccaaaagggctttttttttccagttaaaaagttatttttccccccccaaatttaaggttttggaaatttttttttccccctttggggggtaaagggggttttaccccggggaaaattttttaaaaaagcccccttgggggggggttaaaacccctttggaaaaaaatgggggggaaaaaaaggggctttttttaaaatggtaacccccccaaaaacccttcccccctttttttttttaaaacccccccgg

SEQ ID NO: 61095 - DNA, 231 bp, Homo sapiens
acttttttttttttttttttttttttttaaaatatttttttttaaagagggggaatatattgttggaattccccggccggggccaaaaattttggggaaaaattgggggggttttttttttcccacccccccttttttttttccccttttaaaattggggaatttttttttttggggggataaatttacccccttttaaaaatttattttcaggggggtttttttttcttt

SEQ ID NO: 61096 - DNA, 528 bp, Homo sapiens
actttttttttttttttttttttttttgggaaaaaaaattttattttttccccccagggggggaggaaagggggaaattctggttaattgaacccccccctttcggggtaaaaaaaatttttccccccaacccccaaaaaaatttaaaattaaggggggcccccccccccccccattttttttttttttttaaaaaaaaaaagggggtttccccttttgggggggggtttttaaaaaccccccccccgggggaaaccccccccccaaattcccaaaagggggggaatttaagggggaaccccggggccccacccaaaaatttttaaaaaaatttttttcccccgggccttttttttttcccttctttttaaaaccaaaaaacaacccccggggggggggaaaaaaaaaaaaacaccccaaggttttttcttccccccccttggggtaaaaaaaaacctttttttaaaaatcctttttggaaaaattggaaatttaaaaaaaaacttgtttatcccaggggggaaaaaa

SEQ ID NO: 61097 - DNA, 362 bp, Homo sapiens
  misc_feature 42, 88, 104, 270: n = A,T,C or G
ggtggcggccgcccggcagggccttggggagatagttgggangaggaccccacagagcccccactggggcactgccttttggagctgngagaagaggccaccgncttcccgacctcaaaatggattgggccgagcctatgccctggcttttgcagaaagaggagcgtttttgttgtgctgtttagggaggggacttttttggagttggccccgctccataacagctgataaggttgttgaagaaataagaaggtgtggtggaaaagcagnggccaactatgattcagtggaagaaggagagaaggttgtgaagacagccctggatgcttttggaagatagatgttgtggtcaacaatgctgg

SEQ ID NO: 61098 - DNA, 287 bp, Homo sapiens
actttttttttttttttttttttttttttttaaaaaggggaaaaaaaaaaattttaggggggaaaattttggaaacccctggtttaaaccctttggttttggctttaccccctaacctttttttggaaaaaaagaggatttttttccccgggcccttaaaaaattttttttgggggggaaaaaaaaccccccttttttttcctttcaaaaatttttgggaaagggccccaaaattttgggaccttaaaaacccaatttttttttcttggggggggaaaaattttttt

SEQ ID NO: 61099 - DNA, 438 bp, Homo sapiens
actttttttttttttttttttttttttttcccttttaaaagggttaacaaattaaaaaaggggggttgtgaccctttttcttaaaaaaaaatttggcacccaaacccccttaatgaatcccagaaaaaaattgttccagggggggtttaaaaaaaaaacctcaaaaaggccccaattaatgggttccggaaaaaaaacaaattggaaggggggggcaaaaaatttttcccaattccccttttttcggggttgaaaaaaaaccctaaaaaaaaaaattaaaaaaaaaattttttttttaaaaaaaccccaaattttttttttaaagaaggggggggcttttaaaatatttttaaagttttttttttttgggaaaagggttttttgggaaaaatttaatttccttcccgggggggccgtttaaaaaaagggatcccccgg

SEQ ID NO: 61100 - DNA, 388 bp, Homo sapiens
acgcgagtaactatcttaaataactgatgccctgaagttttgaattttagaagtttttgatgtatttttaaagcgatacacaaataattgaaagttgaaatagtaaataatactgttttccaaagtttaattaaaatactttataaagcttaaaaggatctcaagttacttaaatttgagaaaatgagtttatattgtgatatatgccattaccattgcatttcaacaagttataagaatgatataggtcgggtggggtggctcattcctgtaatcccagcactttgggagaccgaggccggcggatcgcctgaggtcgggagttcgaggccagcctggccaacatggtgaaacccagtctctacgaaaaaaaaaaaaaaaaaaaaaa

SEQ ID NO: 61101 - DNA, 446 bp, Homo sapiens
acttttttttttttttttttttttttttttaaaaaaaaaatttttttttttcccccaggggggagggaaagggccaaatttgggttaaataaaaccccccccccggggggaaaaaaattttttttttttaaccccccaaagggggaaaaaagggggccccccccccggcggggtaattttttgaatttttaaaaaaaagggaatttcccctttggggccggggggggtaaaaattttgaccccgggggaaaaccccccctttgaaccccaagggggggggaaaaaaagggggaaacccccttccgggggcctttaaaaaaaagggaaccccccgggggggaaaaatttaatttaaatttttttaaccccccccccccggggggggggcccggcccccatttttttttccttttaaggggggtaaattcccccctggggaaaaaaag

SEQ ID NO: 61102 - DNA, 434 bp, Homo sapiens
acttttttttttttttttttttaaaaacaggaggagaattggggaagggtttttaaaaaaattttgccaaaggggtggcccctcaaaacgggttttggttaaaaatggcccttggggaacctccccccagccttggggtggggggtttaaataagggcgggcttttttaaaaaaaagccgggccggtttttttttttttttttttttttaaaattgggaaaaaatttaatttcccctttttgcccgggttggaaaaaataaacaaatcttcttgctttcccctccaaaagggttaaaattacaattttaaccctttttccttcccggggggcctttttaaaattagggattccccgggcttgaggaatttcattttaaactttttcattcccgccaccctgaggggggggcccggcccccatttttttttcctt

SEQ ID NO: 61103 - DNA, 293 bp, Homo sapiens
cgcggtggcggccgagtactttttttttttttttttttttttgcccccttgggaagggagggggggggaatttttgttaaaaattttttagggggggaaaaaaaaaaatttaaagggatttgggggtatttttggggcccccccccggattttttttggggcccctttccccgaaaaaaggggggggtccctttaatctttccccaaaaggggtaacccctaatccccttccccggggcccttaaagggggaaaagggggcccctaaagaaaaaccccccccccattaaaaaa

SEQ ID NO: 61104 - DNA, 360 bp, Homo sapiens
  misc_feature 37: n = A,T,C or G
ggataccgcgtactcgtactacttgttgctgattggnactccaccgcggtggcggccgcccgggcaggtactttttttttttttttttttttttttttaaaaaaacttggccaaaacccccggtttttttaaaaagaaaaactttcccctggggggtttttaaaaaaaatatcccccttttttttgggaaaaaaaaaacttcttttactttttttttttaatttttccccccccccccccttgaaaagccccaagtgggttttttcccccggggggggcccaatttttttattttttggcccccccttttaaaggggaaaattgggggtttggtttttgggtcccccaaaaaaaaaaaac

SEQ ID NO: 61105 - DNA, 277 bp, Homo sapiens
acactaaaacaaaaacttcctaaaagcactcacttttatactcaatcttatcagctacttaaatgtagctccttttgtccaattatactgtggcctatgatgcttagtcactttggaataatggtcagatagttttcatactcccacgggaaatatatggagaacaggctagggaaacatgtttattcaaatttaatacgaagcaaccaagctaagggagaaaatgatagcacacccaagaaagaaagaaatgttattatataaattttcttagctc

SEQ ID NO: 61106 - DNA, 286 bp, Homo sapiens
actttttttttttttttttttttttccccaaaaaaaaaaacccccaaccccctcttcttggggggttttaaaaaccctttttaaaaaccggggccggggggaaaaacccgcccccccccaccggggggcaaaaccccttagggggaacccccttataaattgcccccaaaaaaaaaaaatttttgccccccccccccaaaaaaaaaaccccggggggggaaaaaccaaaccaaatttttaaaacccccgccccccctttttttggggcgcccccccgggagaaaaa

SEQ ID NO: 61107 - DNA, 293 bp, Homo sapiens
acttttttttttttttttttttttttgccccccccggggggaatttttggattaaaaccaaaatttcccccccccttaaccccccaaaaaaaaggggggggccccccccgggggaaaccaaaaatttaaaccccggggcccttttttttttccccgggggggcaaaagggggggaatttttttccccccaaaaggggatcccccccccccccaaaaaaaaaaaatttggggaaaaagtttttaaaaaaaaaaagggggcccccccctaaaattccccttttttttaacctttt

SEQ ID NO: 61108 - DNA, 490 bp, Homo sapiens
acttttttttttttttttttttaggggcggggggccggggtatccacctttttttaaaacggggggcactttggggcccccccgggggttaaaatttttttttttgtttaaaagtttttttggcaaaaccaaaaaacattcttgtttttctggcccccaggttaatcccaaagggggtttaagggggtttccggggccaattttaagggaacccaaaaattttttttggaaaaaaccttttaacccccccccgtttggtacccccccccaaaaaaaaaatccccccccttttttttaaaaaaaacggggggcccttttaacccttcaaaaatttccccaaggggttccggggaaaaaaacttggtttcccccgccaaaaaaatttttgggaaacttttttgccaaggggtaaaggggtccacccttttttttttttccctgttaaccccaaacctttcccggggggggtttttaaaaaaaaggaaccccc

SEQ ID NO: 61109 - DNA, 294 bp, Homo sapiens
tccaccgcggtggcagcggccgcccgggcaggtactttttttttttttttttttttttttttgggggaagggggggtaaaacaaaaaccttttttaaaagggggggttttttaagcccaaaaagggggaaaaaatttttaactttttaaaaaaggttttttcaaaagaaaaaaaaaattttttttttttgaaaaaaaaataaaattaaaagggggtttaaaagggtttgggggcaaaattaaaaggaaaaaaaaaattttttttggaaaaaactttttaaaaagggccgggggg

SEQ ID NO: 61110 - DNA, 289 bp, Homo sapiens
acttttttttttttttttttttttttttgggccccttttttaaaacccacaaaacccccccccctaaaaatttacccccccccattttttttaaaaagggggtttttttaaagggctttaacccctggggttttaaaaaaaaaacccaaaaatttttttggggggtttaaaaaaaaaaaaaaagccctccttttttaaaaaaaccttttttcggggggggggaaaccccaaattttttaaccccccaggaaaatttttttttttccaaaaacccccctttttaaaaaaa

SEQ ID NO: 61111 - DNA, 199 bp, Homo sapiens
  misc_feature 56, 76, 107, 111, 113, 115: n = A,T,C or G
ccctcttcctcttgaccctgcacccttctagggcattgtatctgtctttccacccnggatttagccttttttttcnggacgcgttttttttttttgtaagccccagngccncnanaaaaaaaaaaaaaaaaaaaaaaaagggttttttttttccccccccaaaaaaaaaaaaaaaaccggggaggggggcccccccccc

SEQ ID NO: 61112 - DNA, 232 bp, Homo sapiens
actttttttttttttttttttttttttgggaaaaaaattttttttttaaccccagggggaaagaaaaggggggggtttaaattaatttaaaccccccccctgggggttaaaaattttcccccccaaccccccaaagggggggggaataagggcccccccccccaaccggggttattttttttttttttaaaaaaaaaaggggtttaattttttgggccaggggggtttaaaa

SEQ ID NO: 61113 - DNA, 471 bp, Homo sapiens
acttgaatatctcagtagtgctcactaggtaggtgggaaatcactctatacctccatatcccttttttttgtttcctatatctatctctgctcccatggaacaataatttgaacttaaacttgctggctagtcattgtcaagttgcaaaagagacaaagaaaactctttccaagtgacatgggctacagaggagttttgggggagttgaagaggctacacaggtgggatggcagaagaagctatgcaaaaaagtggggagtaggaggcttttagttataaacaacacaaatgaagaaccaaccccttctgtattctgaagctgagtagagttaaggaacctcaaggacaggatgtctacttactgatgggccctgagggctcttggctgggtgttattcccctctcttcagatggagctttggacaagatctgaagttgattctggtggaagtcagagataagcagtatgt

SEQ ID NO: 61114 - DNA, 467 bp, Homo sapiens
ctccaccgcggtggcggccgacggactggttcttttatcactttttttgtgggccagggcgaaactccatcaacacgctattttgcttagggaagccccatccatccagccgggactaataatgaatacatggcatagaaaaattcttccccatcccaaaatccttcccactcttgcttcacagatgtaatacctacagcatgttctgaaggctctctctaccttttgaggttaactcaattttttctttgataaacatttcccaacctgcattcaaatgccagcttgccaactgcttataagatgatctgggaaaacagactcaggaattaacctctcttaaaataactaaaaaacatctttagctttcaagtaacctgttcatttaaccctcgacaaatactcatttgagacagctaaagcaaaaggtgattcaagatataaagaatttttgcttcttcttacac

SEQ ID NO: 61115 - DNA, 320 bp, Homo sapiens
actccaacttttgtaacctttaatgagggttaatccgctctcttggcgtatcatagaactaactgtttcctgcccccttttttttggggaaataaaacccccctaaaaaacccttttaaattttttcccaagccttaaaattcacaaaaatgaaaatcccttttttggaaaaaacaaaaattttttcccaaaaaaaagaaattttcccctcctttattaaaaaaaaaattttttaaaccatttttttaattaaaaggggttttttcaaaaaagggccatttttttttttttaaaatttgggggggttaataaattttttt

SEQ ID NO: 61116 - DNA, 566 bp, Homo sapiens
  misc_feature 6: n = A,T,C or G
acaggnaagcacagtggcatcttcttctggagaggcctcagggagcttttactcatgacagaaggcaaagcaggagcaggcacttcacatggtgaaagcaggaacaagagagagagagtatgttggggtaggtgcactaccatggagacagcaccaagtcacgaaggattcgacctcatgatccaaacacttcccaccaagctccaccttcagcactggggatctggtttcaacatgagatttgggcgggacatccaaactatatcaactgtctccctcatccaagaccatgtgatccgtagctcacttttgtctagcaacagattaaatacagcattttctgtgtgatatctttgttgaggtctttgcagatggctgtttctttgtcctgaaactttcttcatctgctctttcaaaatgagtgactcttcatcctcgaagtctatgcttatatattgcttttcagaggaatcttttctgaactgggcattctgccttcaaccaactattttctattatagtttcctgtttgtgagttaatagtcctttttgaaatttgactactc

SEQ ID NO: 61117 - DNA, 399 bp, Homo sapiens
actcagaagtagaaaggaatagatgcttgatacatgtaacaacatggatgaattgtcaaagtcattacactaagtgaatgaagccagacaaaaaccactacaaactgtataatttcatatatataaaattctagaaagttcagattaatctatagtgacagaaaacagatcaatggttatctataggcaggagggggccaagaacggcaggagggagactgtattagtccatttttatgctgctgataaagacacacccaagactgggaaacttacaaaggaaagagttttaatgaacccacagttccacatggctgggggagcctcacaatcatggcagaaggcaaggaggagcaagtcacatcttacgtggatggcagcaggcaaagggccccgcgt

SEQ ID NO: 61118 - DNA, 384 bp, Homo sapiens
acgcgggtctcacacctgagcggcttaaaacaataaaaaacattttttatccttcacagtttctgtgggtcaggaacttgggaataaaataggctgtacaatccggatcagatttctcatgagttccagtcagattttggctgaggtagcagtaatcttaagcctttgacggggctggaagatctttttccaaggtggctcactcagtgtctgtcaaactggtgcttgctatgagtgctgagtaggaggacttggcttgctttctgcgacatgggccattctacagggctgcttgagtatcctcatgacttggtgctggcttctcccaaagcaagtcatccaagagaacaaggagaaagctgtaatgcctgttatgccctaccc

SEQ ID NO: 61119 - DNA, 294 bp, Homo sapiens
actttttttttttttttttttttttgcttttttttgaaagggggggggaaaaaatttttaaaaaagtttttgcccccaaaattttttttttttacccttgggggggggggaaaaaatttttgggaaccccccggggtttgcttttgaaaaaccaaaaaaaaatttccccctttgggggcctttaagggggtttggggaggaaaaacccccccctttttttaagaaaataaaaattttttttttgggattttttttgccgggcttttgggaaggggggggcttagggggggtttt

SEQ ID NO: 61120 - DNA, 264 bp, Homo sapiens
accacttttgttacaaatatttacaattttttactcccttttttgacttagtttttttttttttaaataaaccagggattgacaaactacagcctcagggccaaatttggccctccgcctttttttgtaggtaaagttttattggaatacagccatgcccatttgttactgtatcgtctgcaaatgctttcaccctatagtggcaaagttaaatagttgagtaaagactgtctggcctgcaaatcaggaaatatttactgcctg

SEQ ID NO: 61121 - DNA, 222 bp, Homo sapiens
  misc_feature 155, 156: n = A,T,C or G
aaaaaaacccggggggatttaaggggcccgggggaaaaaaaaaaagggaaaaaaaaaattttttggggaaaacccaaaaaacccttttttgttttttttccccccccccctttttttttttttcacccccccgaaaaaaaaagggggggcccccnnaacccgccctttttttttttccccgggcggggggggaaaaccctggggccccccccaaaaaaaaaa

SEQ ID NO: 61122 - DNA, 383 bp, Homo sapiens
acctctgtgagggttgtctgattcttcttcttattagattgggattatggaggaaggccacagaggtaaagttccgcttttatgaaatcaagggtaggcaccatcagcatgacctatcactgatgttgactttgattacctggctgctgtagtggttgtcaggtttgtccactttaaagatacttttgtgtttttgttctttcttaactccctttttatattaaactcttcagaaggaagtcactgtgcatagccatcccctaagaagagggccaacagagattttgagaaacacattgaaggatctgttaacacttgatatacccaataaaagcagtggttgtgccagtgctgatctgtcttgatgtgaatgtgaacaatgg

SEQ ID NO: 61123 - DNA, 399 bp, Homo sapiens
actttttttttttttttttttttttttttttggggaaaaaaagggggggggttaaaacttttggggttaaaaaccgggaaaaggccgggccccgccttttttcggtggggggggggggggttccccaaaaacccccccgtttttttttaaaaccgttttttttttccccattggggggggggcccccctttttttttggggttttcccccttccgggggttttaggggggggggggttttaaaccctttttttgtttaattttcccccttgggaaagggggggggttattttcccccctttgggggggggggtgggggggggaatttaacctgggcccctttttgggcccccccccgggccattaaaaggccccggtaacccccggggggggggggggg

SEQ ID NO: 61124 - DNA, 216 bp, Homo sapiens
  misc_feature 10, 11: n = A,T,C or G
tccaccgcgnngtggcggccgaggtactttttttttttttttttttttttgggttttggggggggggtttttaaaaaaaaaaaaggttttttttttttcccccgggtttttttaaaccccgggcccaaaagggtcttttaccccaaccccccaaaagggggggaataaaaaaaaaaaccctttgccccccgtcttgatttttttttttaaaaaaaa

SEQ ID NO: 61125 - DNA, 243 bp, Homo sapiens
tccacccggtggcggccggagtacttttttttttttttttttctttttgggggtgcaaacctgaacgccttttcatttgaacctgggagcctcccctaattgaaatggggccctcttttcccacaaaaatttttttgcccgttcccctaatgaagcttcctaataataactaaaacatctggggctttttttttccccggaggggggggccccaattgcactttagtccctcctcacatcact

SEQ ID NO: 61126 - DNA, 490 bp, Homo sapiens
acttttttttttttttttttttttttttttaaaaccccaaaaaagaaaaaaccccccacctaaaaaaggggcccaattttttccgggccctctttttaaaaaccttttttaaaaaaacttgaaattttcacccccaaagctgccaactgttttccccccccccccccccccccaaaaatttttttcccccacaattttttaggccttttaaaaggcaaaaaacctttaaaaccccccattccccttttaaaagggccccaattgggggaattaaacaaatttttaaaaaatttgggaaaaaaatttacccccccggaccccccccctaaatttaaaaaccccttttttccccctcccttttaaaaaaaaaaacccccccccttcccccaaaaaaaaaaaaaaaattgcccggcccccccaaatttttaaaaaaacccaaattaaaagtttttttttaaccttttattaaccccgggcccccttttttttt

SEQ ID NO: 61127 - DNA, 271 bp, Homo sapiens
acgcgggaatggaaattattgggggagatgtctttaataatacatctcaagataggagaaactttttctatatagttgactttaataaaagcctagggcaaaactttcaatatatttaacagtatttatgaagcagttaagaatttgggtcatctctgtctccactaaaaatacaaaaagttaaccaggtgtggcggcgggtgcctgtggtccctgctacttgggaggcttaagcaagaaaatggtgtgaaccccggagggggaggttgca

SEQ ID NO: 61128 - DNA, 349 bp, Homo sapiens
acttttttttttttttttttttaaatcaaaaaagtttttgaaaaaaacatcttttttttaacttggaaatccccaaaacctttaaaattgggaaaaacttttaaaacttgtaagggccccccccattccccttggggaaaaaaagggtttttttaagggcctcctgccccaaatggagggaaacccaaaacctttttttttttttcccgggtaaaaaaccctttttttccagttttcccccccttttttacacctttgagggctttgggggggttttttttcctagggaacccctgtaccaccgggttttgttttgggcaaaaattttaccagaacctaggtctttttt

SEQ ID NO: 61129 - DNA, 387 bp, Homo sapiens
  misc_feature 36, 67: n = A,T,C or G
atcgcgtatagctactcacctgtaggcctaattggnagctccaccgcggtggcggccgaggtactanctccaaaagcatgtctactatccgtaaatatttactgacttgtccttagctgtgtgacatgttcaggtaagggcagaaagttctgcaggttgggctgacttgacttgaagagttcgcttctctattaactcattttgggtggtaacagcatatcctgactgatatttttttttctgagtttttggcataggacccatcaacaaaaagtgttaattcaggattatccagtggagtatcttgtatagcaacacgaggggccactatttctgatactacactcacaccgttgtggtcttcaccatcatcaggcagagataaca

SEQ ID NO: 61130 - DNA, 533 bp, Homo sapiens
  misc_feature 13: n = A,T,C or G
tccaccgcggtgngcggcccgaggtactttttttttttttttttttttgggggagggggggttaaccctaaccccttttttaatggggggccttttttagccccccttggggggtaaaattttttccccctttaaaaagggtttttccaagggcccaaaaaactttccctttttggcccaacaataaaattcccagggggtttttaaggggttttggggccaaattaaaagggaaaaaaaaatttttttttggaaaaccctttttccccaggcccggggggtttgcccccccccccaaaaaattcccccccttttttcccaaaaaaacggggggcccttttaaccctttttaaaggacccccctgggtttggggggtttaaactttggttccccctcaaaaattttttttggtaaattcttttcccaaaaggtttgggggttcccccctccttttataccccgggaaaaaattttaaattttcccctgggggaccccccccggggggcccttttaaaaataggggaccccccg

SEQ ID NO: 61131 - DNA, 587 bp, Homo sapiens
ccaccgcggtcggcggcgcgaggtactatttacatacggggactgtaacaaattaacacaaactattaccaggtggcctaaaacaacagaaatgtcttctctcacagttttggaggagttggcagggccacattccctcgaacactccaggtaaatccccttcttgccttctctcggcttctgatggctcccaacaatgctgggcatcccttgggttacagctgcattgctccagtctctgcctctgtcgatgtgtggcccgcactctgtgtgtatgtctgtgtctcctcttacaaggacaccagtcatatgggattacggctcaccttaatgaatttattgtaacttgattacctctgaaaagaccccatttccaaaaaagatcacattcacaggtactgggggttaggacttaacacatcttttgggaggacacatagtaatagaatctacacagtttttagtttaaatgaaaattagggccaggtgcgatggctcatgcctataatcctagcactttgggaagccaaggcaggtagatcaccagaggtcagggagtttgagaccagcctggccaacatggtgaa

SEQ ID NO: 61132 - DNA, 494 bp, Homo sapiens
tccaccgcggtggcggccgagcgtactttgttcttttttttttttttttttttaaaagggtttccggtttttgccccgggaggatttttttgggaaaaatgggttaattggccctttgaaccccaaggcccaaacttaacccccaacctttttttcttttatgtgaagggaaaaaaggtttccaaaaacaaaacctggttaattttggaaaaaaaggggtttccccttttttcccaaggtttattaaaaattctaaattcaaaaaaacccccttttttaacctccaaaaagctttgatttaaaaagaaaaaccccccgtcccaacccaaattaattttttttttaaaaattttggtcaaaaaggacccttttaaaaaaagtttcccttaaccccctttttaaaaattaaacttttaccccaattttccaaggcccctttaaaaaaaaccaaaatttttctttactttttcccctttaccttttacccccattaa

SEQ ID NO: 61133 - DNA, 407 bp, Homo sapiens
actttttttttttttttttggggaagggggggtaaacctaaacccctttttaattggggggctgttttaagcccaattaggggggtaaaatttttaccccttttaaaagggtttttccttagggccaaaaaacctgtcctttttggaacaaacattaaatttaacaggggatttaaaggggttttggggccaatttaaaggtgaaccaaaaattttttttggaaaaaccatttttaacaaggctgggagggttggccccctttccctaaaaatttccccattttttgccaaaaaaaacggggggcctttttaacctgttttaaggaacctcgttgggttcggggggtttaactttggtttttccttccaaagttttttttattaaattttttttccaaagggccccc

SEQ ID NO: 61134 - DNA, 257 bp, Homo sapiens
acaagagatatgaattctcaagaatgctgacgcattccatggttcactcagtgtcgaagacaaagcactatgggcccttgatatagtttggatatttgtccccatccaaatctcatgttgaattacaatccccagtgttggaggtggggcctggtgggaggtgtttgggtcataggcgtggatccctcacagcttagttctgtcctctcaaaagtgagtaagagttatcatgagatcaggtggtttaagtgtgtggt

SEQ ID NO: 61135 - DNA, 205 bp, Homo sapiens
  misc_feature 145, 146: n = A,T,C or G
actgttaagtattcctagttgcataggaagttaacaatctaatttgcatagatggaaagcaagttcgttgcttttcctcatgtcagaatactgaggggcttctttgtgaaaaacacttgtagagatatttgtcaacgagtacttnnttttttttttttttttttttttaaaaaacggggtttttccttttgggccaggggggttt

SEQ ID NO: 61136 - DNA, 549 bp, Homo sapiens
acttttttttttttttttttttttttcccctttttttccccttttgaaaaacccattttttgaaaaaggcccttcccccttttttttttttcccaaaaatttttttttttgggggtttaaccttccccacccattaactttaaaaggggaaacccccccccttaaaatggggcccttttttttcctaaaaatttttgggccttcccaaaaaatttccccccccaaaaaaaaaattccggggttttccttttcccccaaggggggggaaaaaaaaaattttttccccctttccttaaaaaacccccaagaaacttttttttttttttttgggcccttaatcccccaaaagggttttaacccaaaaaattttttttaaaaaaattttttaaaaaaaaaaaatttcccccccccttaaaaaaaaaacccccccccccccgttttcctcccggggggggcttttaaaaaataggggaccccccggcccggagaaatttaatttaaacttttttaaacccccccccccgggggggggcccccgccccccctttt

SEQ ID NO: 61137 - DNA, 284 bp, Homo sapiens
acctagaaaatgatggagtgaagatggcctttcagacctgcttgactagtctgaattctcatgatgctgttggctcaggaagtgccctggccacttccacctcaatagcaccacctactctgcctcttcccagtgtcgtgatcttgggcaagtgactctacgtctccaagcatcaggttctttatctataaggtggggataataatagtgcctacctcacagtgttatatgaataaatgagatgctgagcgaatcctgcttagcacattgcctggcacccattg

SEQ ID NO: 61138 - DNA, 485 bp, Homo sapiens
  misc_feature 6, 7: n = A,T,C or G
acacannttttcttagggaaaagcaaattagcggagcacatttttgttttttttttttcttgctggaggtttttaaataaaaatgatggattttcataaaaagttccactaaccttatggggcttttcttgctggggcaagggattttaaaccccccggtttcacctcttccaccttggttttaactaactttttcttctcctttttcttttccacctcctccttttaactctcccctcccacttaatgaaaattttctcaaaattaaattttgggaatccatctttcttttaaaattttttataagtatatttttcccaaacctttttaaaaatggaaatccaaatgttaaattagtattttacttctaccccaaatttatttcccaagttccaaaccagtattgacattgacattgactgatgggacaaatccaaagtttcttcctgatgccctacttgccccctaaaactcatcatatccaa

SEQ ID NO: 61139 - DNA, 498 bp, Homo sapiens
  misc_feature 17: n = A,T,C or G
tccaccgcggtggcggnccgaggtactttttttttttttttttttttgttttttttggaaaaacatggtttaacccttttcccccgggtgggtttgaacccctgacctaaaaggaacccccttcctaaacccccaaaaggggggggattaaaggggtaacccaaaagcccccccccttggaattggaattaaatttaaaagggccttgtttcccaccatttttttgccggggtaaaaaaaaaaaggcccctttttttttttttggcccccccaaaaaatcaaggggcttaaactggacttggtggggttttgttttccttggaacccccaaattaaaatttttggaaaaaaaaaaaaaaatttttttttttttaaaaaaaaaaaaacccaaggggggtttatttttttaaggaaaatttgggaaaggggtttttttttggaaaggggtttttggggaaaaaaagggttttttcccccccaaaaaattgggcccctttt

SEQ ID NO: 61140 - DNA, 307 bp, Homo sapiens
acttttttttttttttttttttgggggggttttttttttaaaagaaacccccccgggggggaaccggggcaacttttgctaaaaccggggtttttttttttaaaacccggggggaaaacccccaaaggggggtttttttttccccgcccccccttaaaaaaagtgggggaaaaattttttacccccccgggggaaaaaacccaattttggggattggggacccccccccggggggccctttaaaaaaaaggggcccccccgggcgggggaaatttattttaaacttttttaaccccccccccccggg

SEQ ID NO: 61141 - DNA, 450 bp, Homo sapiens
acttttttttttttttttttttttcccccttttttgggggggggggggtttaaaaccaaattaaaaaaaatttttttcccggggaaagcccctttaaaaaaaacccctttttttttttcccctttcccccgggggaaattttaaataaaaaaaaacccccccggatttcccccggccaaacccaaaaccccggggaattttattcgtaaaaaaaaaaacccttaaaaaccggcccccccttgggaattccctaacccaacttgggggccaaaaccccttttgtgaattggcccctaaaaaaaaaatgcccctttttccccaagggaaacttttcccgtgggcaaatttttggaacaaatgaatttaaaaaccccctttaaccgggaaaactttaacctttccccccccaaaggtgggtttttcccccaaggcccccccacccaaaatttt

SEQ ID NO: 61142 - DNA, 236 bp, Homo sapiens
actttttttttttttttttttttttttgaaaaagaggattttttttttttttttcccccaggttgaagggaagggggaaaatttaaatttattaaaaccccccccccaaaagaaaaaaaaatttcccccccccacccccaaaaaaatggggaattaaaaaattccccccccccggggggaaattttttttttttttgggaaaaaaaaaaaaccttttcccccgggttggttaaaaa

SEQ ID NO: 61143 - DNA, 300 bp, Homo sapiens
actttttttttttttttttttttaaaggagagaatgccaagggttccgggggcgggataaaaagggttttccaaaagggggccccccccattttaaagtccccccccccaaaacaaaaaaattccttacccccaaccctttaaaagggggggaacaaaggggtttccccccccccgggttttaaaaaaaaaaaatttttttttttgccccccccaaaaaaaagggaaaattctttggaaaaaaaaaaccccctttaaagggttaaaaaaccccccctttttttggggggatcccccttta

SEQ ID NO: 61144 - DNA, 278 bp, Homo sapiens
actttttttttttttttttttttttttccaggggggggggtttttcaaccacaggggggcccccagggggaaacactttgtaaaaaaaccctccggggagggtttttttttttctccgcccaaaaaaaagggccggggaaaaattttttttttttttttctaaaaaggaaacaccccttccggcccctttttttaaaaccccccccccccaaaattgggggggaaaacaaaccttttttttgttaaaccccttaaatttggtgccccccccccccccc

SEQ ID NO: 61145 - DNA, 326 bp, Homo sapiens
  misc_feature 175: n = A,T,C or G
ccaccgcggtggcggccgctccgggcaggtacgcggggtatggaaaaaaaaaaaaaaaaaaaaaaaaaaaaaaaaaaaaaaaaaaaaaaaaaaaaaaaaaaaaaaaaaaaaaatttttttattttttaacaaaattttttttttgttttttttttcttatataaataaaaaaaanctttttttttttttttttttttcctttttgtaaacttcccccctttttttttgggtttttttttttttttttttcccccgggttttggttttttttttaaattttttttttccccccttcttttttgggggggcccccccccctttttttt

SEQ ID NO: 61146 - DNA, 189 bp, Homo sapiens
tccaccgcggtggcggctgccaaaacctaaataccgccgactgggtggtttcaacagaaatttatttctcacagtcctggaggctggaagttcaagaccaaggtgtcagcaaggttggttcctcctgaggctcctccttggcttgcagacagctgtcttgctgccgtggccttgcagggcctttgtggt

SEQ ID NO: 61147 - DNA, 308 bp, Homo sapiens
acttttttttttttttttttttttttttttgcgagaaagaggagaccccagagggggtaaaacttcaaagggggggccccccaagcccccccccccccggcttttttgggcatttgtttaaaaaaattatatcgttttttttggggccccaaaaaataaagccatataaaagggttctccttttaaaaacaacaaaaaaggggcccccttggaaaattttttaaattccaacccacaaggcggataaatttgggggaaaaaaaccttttttaatcccccctaaaaaaccccggggggggcccagaaaa

SEQ ID NO: 61148 - DNA, 284 bp, Homo sapiens
  misc_feature 79, 80, 81, 82, 83, 84, 85, 86, 87, 88, 89, 90, 91, 92, 93,94, 95, 96, 97, 98, 99, 100, 101, 102, 103, 104, 105, 106,107, 108, 109, 110, 111, 112, 113, 114, 115, 116, 117, 118,119, 120, 121, 122, 123, 124, 125, 126, 127, 128, 129: n = A,T,C or G
  misc_feature 130, 131, 132, 133, 134, 135, 136, 137, 138, 139, 140, 141,142, 143, 144, 145, 146, 147, 148, 149, 150, 151: n = A,T,C or G
actttctttttttttttttttttcatccagaaaacacccactattttctagagcggtcggcaccgaagagaaactgggnnnnnnnnnnnnnnnnnnnnnnnnnnnnnnnnnnnnnnnnnnnnnnnnnnnnnnnnnnnnnnnnnnnnnnnnnaaacccccctttgtttggggaaaatttttaaagggaatttggggcttgaaacaattttttaaaccctttaataaaaaaaagttttttttaataaaaaaatttgttttccacccaaaaaattttccccaaaagg

SEQ ID NO: 61149 - DNA, 548 bp, Homo sapiens
acacataagagatccatgggccctaagtcctcctcagctccacaaagctggctgtgaagaagttgctgaactactccataaccttttattttacagttgctttcatgagcatgacttgtttccataatcacatgcaaattgggggaagtaagtatatggatggaaacagggggtggctgtaagtagatccagtttctctcccctggggtggctgatctcagtaagacttagggatgcaggtgggcttttatctttgtctctcttaggggatgagggaagagagggacagcagaggtgagaacagagacaaagaagtgcttctgaaagttggtctggaattagaccccaaagatcctgactaatattgccccccacttgggcttagcgtcctttgttttaactggcttatttttaaagtaaattagttgttcagcatgttgctaaaacaaaacaaaacaaaattctaaaaatgaattaaatcactttcatccacttcatcccacaacttttggatacactgtgcatcatttccagatttctccacaaag

SEQ ID NO: 61150 - DNA, 466 bp, Homo sapiens
acttttttttttttttttttttttaaggaagggggggtaaacctaaacccctttttaaatggggggcggttttaagcccaactaggggggaaaaatttttacccctcttaaaaaggtttttcccaagggccaaaaaacctgtcccttttggaccaaacagtaaaattaccagggggttttaaagggttttggggccaaattaaaagtgaaacaaaaattttttttggaaaaaccacccttccccaggctgggggggttggcccccttacccaaaaaatttccccactttttgccaaaaaaaacggggggcctttttaacctgttttaaggaacccccccgggtttggggggtttaaccttgggctccccttcaaaagtttttcttagtaaatccttttcccaaaaggtttgggggttaccccttcctatataagccggggaaaaaatttaaaattttccccttggg

SEQ ID NO: 61151 - DNA, 618 bp, Homo sapiens
  misc_feature 560, 563, 564, 565, 571, 572, 573, 574, 575, 576, 577, 578,579, 580, 581, 582, 583, 584, 585, 586, 587, 588, 589, 590,591, 592, 593, 594, 595, 596, 597, 598, 599, 600, 601, 602,603, 604, 605, 606, 607, 608, 609, 610, 611, 612, 613: n = A,T,C or G
  misc_feature 614, 615, 616, 617: n = A,T,C or G
attcgcgtactacgtactcactatgaggccgaattgggagctccaccgcggtggcggccgattctactagcattattctgaatactgtcgccccatggtatctgtggggaactggttcctggaccttccaaggataccaaaatccatggatgctcaagtccctgatataaaatgacacagtatttgcatataacctacacacattatcccatatactttaaatcatctctagattacctccaatacctaatacaatgtaaatgctatgtaaatagttgtcctactgtattgcttagggaataatggcaagaaaaaagtctgtatacgttcagtacagatgcaatttttttcacaagtattttcaatccacagttagttgaatccacagatatggagaactgattgtacctcggccgctctagaactagtggatcccccgggctgcaggaattcgatatcaagcttatcgataccgtcgacctcgagggggggcccggtacccagcttttgttccctttagtgagggttaattgcgcgcttggcgtaatcatggtctactnttnnnctcggnnnnnnnnnnnnnnnnnnnnnnnnnnnnnnnnnnnnnnnnnnnnnnnc

SEQ ID NO: 61152 - DNA, 163 bp, Homo sapiens
acttttttttttttttttttttttttttaaatttttattttaaagaggggaattttttggaattcccttgttagggccattaattttgggaaaaattgggttggttttttttttcccaccccttctttttttttttccctttttaattttggggatttttttt

SEQ ID NO: 61153 - DNA, 458 bp, Homo sapiens
actttttttttttttttttttttaaaaaaaattcctggggccaccccaaaaaaaaacccaaaggggttcccgggtttggggtttttccccccccccagggaaaaaaggccaaattttagggcgttaaccccaaaaaaaacgggcccccttgtccgggtttttttggggaaaaattaaaagacccttccggggagaatttttaaaaaaggggctttaaaaataaaagtttcctttcccaaaaaaaaaaaaggggggggtttaccggggattccaaaaccccccccaattttgcccccttaattttggggcgggatttaaatttgggggaaaaaaccaaaaaaaaatttccttttttttttaaaaaaacggggggggggccccaaacagttaaaaatccaagggtcccagttttttttgcttttttttttaaaacaaaaatttcctaaaaaacatttttt

SEQ ID NO: 61154 - DNA, 291 bp, Homo sapiens
acttttttttttttttttttggttttaaaaagggaattttattttttcctccaatttggagggggcaaattttggtttaatgaaaacccccccttctgggttaaaccctttttttttcctaaaccccccaaattgtttgaaataaaggttaaaacccctttccccaaatttaaaaggccttttttaaaacggaaattttcttaaaaggggaaacaaaaactgcttttaaaacttccttaaaacttgttaaaaataaaaataaaatttttcccaaatttttaacccctttaa

SEQ ID NO: 61155 - DNA, 149 bp, Homo sapiens
tccccgcggtggcggccgaggtacttttttttttttttttttgggggaggggggggcaaacctaacacaccttttttaattgggggcgtctttaaggcccacctgggggttaaaaatttttccccccctaaaaagggttttccctaagg

SEQ ID NO: 61156 - DNA, 379 bp, Homo sapiens
  misc_feature 1, 44: n = A,T,C or G
nggatcccgtcgttctgcgtactcactctgatggcctgaatggnagctccaccgcggtggcggccgcccgggcaggtacgcgggggtctcagctactcaggaggcagaggcaggagaatcacttgaacctgggaggccgaggttgcagtgagccaagatcacaccactgcactccagcctgggtgacagagcaagactccagctcaaaaaaaaaaaaaaaaaaaaaaaatcccccgggcccctttaaaaaataggggacccccggggccgggaaaatttaattaaaacttttttaaacccccccccccggggggggggcccggccccccttttttttcccttttagggggggtaaatgcccccctggggaaaaataggg

SEQ ID NO: 61157 - DNA, 141 bp, Homo sapiens
tccaccgcggtggcggccgagtactttttttttttttttttttggggaagggggggtaaacctaaacccctttttaattggggggctcttttaagcccacctaggggggaaaattttttacctctttcaaagggtttttcc

SEQ ID NO: 61158 - DNA, 300 bp, Homo sapiens
actataaggaagagctttccttatcttccacttatttatttatataagtatggcctcagaaattcctgttttatgcaatgagctatgatcttttgctgtcacttagtttgatgctgtaattatctaagatttggctagtgggagccccttcatcctggctcttttatcttttgtgacctgtctccatcatttttttggagcactttcttactttctggcacaataaactgttccaggtgcaccttgtgctttccttgccccagggctgggatcagccatttctccaaggagcccttggag

SEQ ID NO: 61159 - DNA, 287 bp, Homo sapiens
actttttttttttttttttttggggaagggggtgtaaacctaaacccctttttaattggggggtgcttttaagcccacctaggggggaaaaatttttacccctcttacaagggtttttcccaagggccaaaaaacctgtcctttttggaccaaccattaaatttaacaggggatttaaaagggttttggggccaatttaaaattaaaccaaaaattttttttggaaaacccatttttccccaggctgggagggttgccccccttcccctaaaaatttcccaattttt

SEQ ID NO: 61160 - DNA, 424 bp, Homo sapiens
actttttttttttttttttttttttggaaaaaaaaaagggtttatcccccccccccggggtttttttaacccccgggcccaaatttttttttaaccccccccccccaaaggggggggaaaaaaaaaacaaaccttttcccccccccctgggtttttttttttaaaaaaaaaaaaaaagggggtccaccttaagggcccccaaaaaaaagcccttttttttttaaaccggtttttttaaaaaaatatttttttttcccccccccaaaaaccccaaatttttccccaaaggggaacctcaaaaaattaattttttttttttttccgggaactgcccctttttttaaaaccccccccttccccccttattttggtttaaaaaaaaacccgtttaaaaaaacccccccaaaaaaaatttttttaaaaa

SEQ ID NO: 61161 - DNA, 478 bp, Homo sapiens
actactggcttcccagtggttgggttgagtataagcccccaaattgagtaaaagaagaaaaagttaattcaatcaccaagtcttgctcgcatattaaaaattggatagatgaatgttcaatcatatgttttggctttggccagccagacgaggtcaatttttagatttgaactgcttagaattcttcagacaagtcttgatggagcacttcttggacagttagaactttaccaggttcacaggagagctcagatgaagcgaacacctcatccacactggtttcctttggagacctttactgttgagaggtggttttcatagccgcaaaatgacaagtgcaagttgagtagatcagtgtttatcaaccaggtgccacattgtgccccaggagacatttgacaatgatggggtgttactggcatctagtagacagaggtcagggatgctgcttaacatcttacaatgcacaggacagttg

SEQ ID NO: 61162 - DNA, 486 bp, Homo sapiens
actccagcctgggcgacagagcgagactccatctcaaaaaaaaaaaaaaaattagtgggttttaggggcccccccttttttcccaaatttgggaaacctaaggcaaagggatcttttgcccccaaaatttcggggttccggggacccttatttttccccttgttttccaactggggggcaaacaaaaattcccacttccaaaaaaaaaaaagggttttgggtttaaaaacctttgaaagggatttaattttgaagaaaaaaaaatatcattgtttttttttgctaggggccaccaccttggtaaaaggaggatttttaaaatttacttcccgggaaaaaaaaaaagggggaaaaaaaacccaaaaaaacccccattttttcccgttttaaaatttttttctttttgggggaaaaaggggggggaaaagggggaaacaaaattgggtccccaaaaaaattttttaaatttaaaaataaaaaaaaatt

SEQ ID NO: 61163 - DNA, 289 bp, Homo sapiens
actttttttttttttttttttaaaccacccctgtttggggttaacaggggggggaaaaaaaacttgggggtgaatggaaaatttggggctgtaaattgccattcaagggtttaaatctaccccaggcttttccggagaaaaatgtttcaatgtaccttaaccaaacataattttttttttgggggaaaaaatgggcccaatggggggggaggagtcaattttttttttgggaatttttggggtagggggtgtaaaccttaaccccttttttaatggggggctgttttaa

SEQ ID NO: 61164 - DNA, 350 bp, Homo sapiens
  misc_feature 34: n = A,T,C or G
ggacccgcgtactcgtactacttgtggcctgatnggactccaccgcggtggcggccgaggtactttttttttttttttttttttttgggggaaaaaaatttttttttcccccaaaagggggggccggggctttttttgggtttaatgaaaccccccccttcgggaaaaaaaaaattttcccgccctctccttgggaaacccggggattaacggggaaccccccccgcccccggttttttttttttttttaaaaaaaaaggggttttttttttttggcccggggggggtttcccccggccccttgagaaaaccccccccttttgcccattattagaaaaaaattttttttt

SEQ ID NO: 61165 - DNA, 525 bp, Homo sapiens
  misc_feature 17: n = A,T,C or G
tccaccgcggtggcggnccgaggtacttttttttttttttttttttttttgggttgtttttttttaaaaaaaaaaagggtttttttttttcccccggggttttttaaacccccggacccaaatttttttttacccccccccccccaaaagggggggaataaaaaaaaaaacccttgcccccccccccggatttttttttttaaaaaaaaaaaaaaagggggccaaacctaaaggcccccaaaaaaaaacccttttttttaaaaaacggtttttttaaaaaaaaatttttttaacccccccccaaaaaccccaaatttttccccaaaggggaacccaaaaaaataaatttcttttttttttccggaaattggcccctgggaaaaaatccaacattttttgtttttccccccccgggggggccttttaaaaaaaaggggccccccggggcgggaaaattttaattaaaatttttttaaccccccccccccgggggggggcccccgccccccttttttttccctttta

SEQ ID NO: 61166 - DNA, 190 bp, Homo sapiens
actttttttttttttttttaaaaagggattcaacttttcccaccaaatggaattaaaggggccccttttgggttaatggacccccccccctccaggttaaaacaatttttcttccctacccccccaaattatggggaataaaaaaccctgccccccaccccaagaaaattttttaaatttttaaatttta

SEQ ID NO: 61167 - DNA, 223 bp, Homo sapiens
acttttttttttttttttttttttaaaaatttttttattgggggggggccggtttttttcgggttgagcccgggggaaggtaaaaaaaaaagggatttgggggtctttggaaacccccccggggcggcaaatttttcaaaagccccttgggggggggaaaatatttttctcctttggggccaaaatttaaaaatttttttattggggggaaagccctttttgg

SEQ ID NO: 61168 - DNA, 460 bp, Homo sapiens
actttttttttttttttttttttttgggggagggggggggaaccctaaacccttttataaagggggggcgtttttaacccccaattgggggtaaaatttttaaccccttaaaaaagggtttttccaaaggccaaaaaaacttgtcccttttggaccaaccataaaattaccagggggttttaaggggttttggggcccatttaaaagggaaaccaaaatttttttttggaacacccatttaccccaagcccggggggtttgcccccccccccaaaaaaatcccccccttttttcccaaaaaaaaggggggccctttttaacctttttaaagaaaccccccgggttcgggggggtacaactttggtccccccccccaaatttttttttgaaaattacttaaccaaaagggagggggggtaacccctcctattttatcccgggaaaaaaattgcaatttttc

SEQ ID NO: 61169 - DNA, 393 bp, Homo sapiens
actccattaacattactatgacccccgggcaccctgcacatatagcggcagtccccaccggcgtcaccaaaaccttggatcatcttggtgtataaatgtcagcatcagctggctggcaggtaaaaacaaacagaacacaacaacttgactgtgtttcatttgttctgattatggctaccaaggttcggtgaaacccgagcagggacaagaaataaaaatgccattttatttggggagcccgtatgtgggcagtctgtccttacacaggtttctgtaagaacagattaagctagtttgaaagtcgtgccagattagaaaacttgtaaaaatctaaaacgaaatgttcctcaaaaggatttaagtccacagacaggaggtttactcactgctagt

SEQ ID NO: 61170 - DNA, 288 bp, Homo sapiens
actttttttttttttttttttttttgggccaaaaaaaaataaaagggaaaaaatcctggggggggggaacttcctattaaatacccccctaaaattaattaaaataggtctcccccaatttttggggtggggaattaaaacttttaaattcccgggccccccaaaaaaaatttttgcccccccggaaaaaaaatcccttaaaaggttttttttttttttcaaaacaaaaaaaaaacccccttttttaagttttttaaaaaaaaaaaaaaccccaaataaaaccccccc

SEQ ID NO: 61171 - DNA, 522 bp, Homo sapiens
accccaataatcaggcaactctggtgcttgtgaagggacttggagaaggggacttcttttcccactcatccaccgctgcagacacagctgaagcttcttccacaggagtttggcatgggtatacctataaatagacttcgtggaaaacttcagggtgactgcatccccacagaaggagcatccttcaggttcaggctggcatgagacataaagtcacaattcctctttacttggaacattaacattcctgcagataaaaagaggtgcctgtctaatctgaatagctagaacactgagttaaaagtgtgtctgggaggtggatagctttcatgctggcctcgcaggggagtgaaggtagctcccacacttcctcctgataagacctcagtgcatttcactgaaaggtcccccagccacctctgtcaaggctaggacttctgccctccattgggtatggcatttacccacctgctttagcccaactggtttctacccatggacaccccctttactggcctgaag

SEQ ID NO: 61172 - DNA, 572 bp, Homo sapiens
  misc_feature 166: n = A,T,C or G
tccaccgcggtggcgccgccctccagccaggtgctccacctgcctgttggacttcaatatctgccttatctatatcttcaacctccatgggcggcccaggacctagctgccgaccgctccctgcacgcataatcccgccctgatcaccatgttggttatatctcgngcccgtttccggaagatctgcagggactgcccagcgtgcagcattcctggcgtggcaaacacaaccatcggtcctgggttgtcagcaaaagcccggtcgaaggccttgatgtgcttgaactcaaacatgttcctctgcacaaaagtcttgcggatcttctggttggtccaggggatgaacagcttgtagtagtggttggccttctcggtcagccccgtggagaagtagatgggcaccttcaggttcatgcgctcccagaaggtctccaggaggatgcagagctcctgggcgcggcccagcgcgaacacaggtatcagcaccttcccaccacgctccacggtctcgtggacttttttcaggaagtctcgctcccggcagcgcttggagtcacggatggtcgtggcgt

SEQ ID NO: 61173 - DNA, 579 bp, Homo sapiens
  misc_feature 432, 457: n = A,T,C or G
tccccgcggtggcggccgaggtacgcgggggaatcggcgtttgccgaggctggcatagatttggctgtctccgctcatagctgcttttggcgcgaaagatgccgggtctggttgactcaaaccctgccccgcctgagtctcaggagaagaagccgctgaagccctgctgcgcttgcccggagaccaagaaggcgcgcgatgcgtgtatcatcgagaaaggagaagaacactgtggacatctaattgaggcccacaaggaatgcatgagagccctaggatttaaaatatgaaatggtggtctgctgtgtgaataaataattcctgaagaatgaagaagattaattttgggagttctttgacgaactttgatatgtggaaaaagtatttataatttattgtaagaaaaaagtaaaatattactagtggaagatnaaaaaaaaaaaaaaaaaaaaaaaangggtcccctcccgggggggccctttaaaaattgggggccccccggggcgggggaatttaattttaacttttttaaaccccccccccctgggggggggccccgcccccctttttttttccctt

SEQ ID NO: 61174 - DNA, 211 bp, Homo sapiens
actttttttttttttttttttttttttataaaatatttttttaaaaggggaaatttgttgaatttccctttaaagggccattttttttgggaaaaattggggggtttttttttttcccacccccttttttttttttccctttttaaattttgggaatttttttaatgggggtggtttattttccccttttttaaatttatggttaaggggg

SEQ ID NO: 61175 - DNA, 222 bp, Homo sapiens
accttttttttttttttttttttttggggggggtgggcccccattttaaaaaaacccccccgggccggggggtcccccccctaatttccccctttttggaaaacaagggggggaaaaaaattttgccccctaaaaaaaaaaaaactttgggggggaaataaaaaaaaattttttttttgaaaaaaaaattcctttttttgaaaaaccccttttttttaaaac

SEQ ID NO: 61176 - DNA, 301 bp, Homo sapiens
tcgatgtacataacgacggccagtatttcttggttcttaaactgaatcctgtttttataccccgggcagtaatccaggttatgggaacccccttctttggggttaaagggaatcctggcccctaaccccctaaaaaggtggttttaaaaaagggccccccccccccggggtaatttttttttttttaaaaaaaaaaattttttttttttttcccccggttccttgggccttttaaaaaaaggggaccccccggggcgggggaattttatttaaaattttttaaaccccccccccctggggg

SEQ ID NO: 61177 - DNA, 201 bp, Homo sapiens
acagagaatgaggtgatataggagaaagagactggggagggataaaatgagagacagggaaaggaagataaagacatgggaaggtagagagaagggaatacagggaggaagagagcggaggaaaagacaggaagataatgattggggagagaggaagtagagatggggaaaggggggagagatagaaaaggggagagggat

SEQ ID NO: 61178 - DNA, 529 bp, Homo sapiens
acatcctaaatggcactgccacttacagaagcaattcagaaaggggtaaacttccaaaaagtccagaaatccattcttagtcctgcttcactgcacaaagacatgggaatttaacacatcactcactggaaagatgctgcccctgcaaatgcgcaaccctgttaactacttagattcaacccacactaggccccacttagggatctccaggcacagacaggatgcgctgagtagggaacatgtccccacactactagggacacccatagagggacggtcttcaccaactgcctgatcaaacctgagttacaaacgggaaagcacagtgtccaagaaacgactagaggctacacatggtaagtgctgaggcaggaggaaaccctgaggaacttccagagacatttgagaaccagaaaaatctgtccttccctctcacctcctcaccctttatgcctcccaccttctcattcctcccatctttcttatccaccacccccacccccaactcccaccaccagcctccccgcgt

SEQ ID NO: 61179 - DNA, 479 bp, Homo sapiens
acttttttttttttttttttttttgggggggaaaaaattttttttctttttcccccccaggggggaggggaggggccaaaccttatttaacccaaactttttcccccaaaaaaaaatttttttcccccccaacccctcaaaacagggggatttttggggggacccccccccccccaattttttttgttttttaaaaaaaaaaggggttccccctttggggaaaaaataatttttttggaaaccccccccccgggcccccaaaagggggggaataaaaagtggggccccccccccccccccttaaaattgttttaaaaaaaaaaccccgggggattcctttcccctttaccttaaaaaaacccctttttaaaaaattccccaaatccccctaaaaaaaaaaacccccgaaaagcctaaagttttaaaatttcccccctttttttaaaaaattttttttttttaaaccggggttttaaaaa

SEQ ID NO: 61180 - DNA, 352 bp, Homo sapiens
tccaccgcggtggcccgggcaggtacatagggcagagtccaggaaaaaaccaaacatggagcttctgttgtcctctccctatggttaatggatggcgttacttttccagcattggtatgtgacagaacacacaaccattgccaaccactgccaaccacaagcttattcgagcctcaatgtccagagtttttattggggcttcatcacaaaggcatgattgattgaccaccttgctgatctcagtatgcagccccactaaaggtcatctgatgttacatgacccaaagcccccacccaaaatcacattttttgtatttctggcatgattgattgaccaccttgctgatctcag

SEQ ID NO: 61181 - DNA, 313 bp, Homo sapiens
tccaccgcggtggcggccgtagtacgcgggtagtatgacaaatggtgtctgaatagaatgaccagcatgaagagggactttaacttgaagggaggacacaaattccctcctgttgtgggctactatgaaggaagctgtgaacatattcatgtggctcacgcctgttgtcccatgactttgggaggccgaggcgggtggaacatgaggtcaggagatcgagaccatcctggctaacaaggtgaaaccccgtctctactaaaaaaatataaaaaattagccgggcgcggtggcgggcgcctgtagtcccagctac

SEQ ID NO: 61182 - DNA, 347 bp, Homo sapiens
acatatagatgtgtatctaaaacacacacacacacacacctcttcagcctttgttgtatctgcaaaatataatttccatttttccctttccctaattaccacctaataacatgccctgcataatcttgcttacagtaagcatttcaaggaatatttatgaaatgaatgaataaacaagtgagcaaagcttctgaaacatataaacaataatcttatgtaaccataaacttagatcctgaaaagctgtatgtgacttgtcacaccaaagggctcaagttcaaacaaacaaaccaagaagggacaaaaaaaaaaaaggggaaacattttgaagtccaaaaaccccctgg

SEQ ID NO: 61183 - DNA, 289 bp, Homo sapiens
actttttttttttttttttttgaagagagagggagggggccaaattaaatttaagcaacccccccctccaagggtaaaaaaatttttttgcccaacccccctaaaaagggggaaaccaaagcccctcccacccccccggggaaaattttttttttttttttttttttttaaaaaaaaaagggggttttattttttaaacggggggggcccaaaatttttaaccggggggaacccccccttttggcccttaaaaagggggggaaaaaaggggggaaccccctgccccggg

SEQ ID NO: 61184 - DNA, 450 bp, Homo sapiens
  misc_feature 445: n = A,T,C or G
acacactagactcaggctcgcagtctctctcactacccgaggcatgagtgtgagggaggctgtttgtattctatgctaatgcttttttttcaatgctcaattcccctccccccgcctttttttgttttaactgtctcacatttcaacatttccatataaccagctaatctgataaacccatacttgacatacggaaaaagtcaagaaaagcctatttgtgggctatctttgtctttctaggttctaagtgtcaaacgatatttaagagtgtttgtttgtttgttgtggagccattttcgttgcttttgtgatataatagaaaaatgggaagtgagctaagcaccgtggctcacgcctgtaatcccagcactttgtgagacctgagtggatagatcatttgagcccaggagttcaataccaacctgggcaacatggtgagaccccncgcgt

SEQ ID NO: 61185 - DNA, 309 bp, Homo sapiens
acttttttttttttttttttttttttaaaaaaaaaatttttttttttccccccgggggggattaattggggtaaatggaaccccccccaaaagggttaaaaaggatttttgggccccaatttttcaaccccccaaaaaagggggaataaaggggggccccccccccccccccccatttttttttttttttaaaaaaaagggggtttaattatttgggccgggggggtttaaaaatccccccccaaaggaacccccccccctttggcccccaaaatttggaaatttaaggggggggccccccttcccccc

SEQ ID NO: 61186 - DNA, 144 bp, Homo sapiens
ctccaccgcggtggcggccgagtacttttttttttttttttttttttgggggggggaaaattttttttttgaaaacccttaaaaaaaaaattcaaaattttgggggttaaaaatttccccccccgaaaactttccccctttttt

SEQ ID NO: 61187 - DNA, 441 bp, Homo sapiens
  misc_feature 288: n = A,T,C or G
cgggtacttcaattagggcagccaaggaagccttcaccaaagtggtgacattttagtttagagctaaatgaggtgaggggtggggcaatataaatatctaggggaagagaattgcaggaagagagaaaagccactaatactggaaacatggtttgattttacaaagggagatttgagaatggtggtatttgaaagatagatttttgtcttaggagcagtttttcaggaatgtttcattcatatacacacacacacacacacacacacacgcacacacacatatatagnagtatatgtataatagaatatatattctaaaatgtagaatgggatgaacactgacctgtcaaaattgtgtactcagagtcccagcacctgaagaaaatatatatatttaaaaagtggtaggtatctggagttttattatcactatttttaggc

SEQ ID NO: 61188 - DNA, 448 bp, Homo sapiens
  misc_feature 7: n = A,T,C or G
acccagnaaaaccaaaatgagcttaaacattttgaaagatgtcaacaaagttatgcccttggaaataagtttggtttatgtaagagcattgttcctttaatgtaaagacacaataagtttggctcgcattgtaaaagtttgaaatctcatttaggttttgttatccagagtagaagatatgcaggaaaagattctgatgcatttggtggatatgggagatcatgcctccatatcaagcgtgacaaaactcttactggagttaaataccatagatgtgttaaacccagcagccctaaatcacagctcaatgacctacaaaaaatttgtgcaggagggaaaccacatgaatgcagtgtgtgcgggagagccttctccaggaaagcacagcttattcaacatcagagaactgaaagaggagagaaaccccatggatgtggtgaatgtggga

SEQ ID NO: 61189 - DNA, 285 bp, Homo sapiens
acttttttttttttttttttttttgatacttaaaccaaaaagcttttttttaaagggactttttattttgggggggggggaaaaaaaagggggcaatttgggaacaaatttttcctttggccaagggggaaaaccccactttaaaaacccaggggggcgccaaatttaacgcaaccccggggttttttttttttaccccaaagggggagacactttccccttcccccgggggctttttaatttggggataaagaatccgtttgtttcccccaaaaaatccccccc

SEQ ID NO: 61190 - DNA, 171 bp, Homo sapiens
actttttttttttttttttttttttttggcccctggggaagggggggaggaaaaattttggtttaaaatttttaagggggggaaaaaaaaaattttaaagggttttgggggtttttttgggggccccccccggtttttttttggggggcttttcccttaaaaagggggggg

SEQ ID NO: 61191 - DNA, 277 bp, Homo sapiens
acaggtttgtagcctagcagcaatagaccccaggtgtgtaataggatattaggcttgtgtgaatatgatgttcacacaatgatgaaatcacttaacacatttcttagaatgaatctttgtcattaagcaagttttcacttaaaaccatgcttccttctcctctgacccaaggtggtgctctctctgcctgggctgtcttcacctcactatgaatgcttaagttctcgggttgtgtgtcagccccagcaggaagccttacttcatctggactgagtgg

SEQ ID NO: 61192 - DNA, 295 bp, Homo sapiens
acttttttttttttttttttttttggggcctttttttttaaaggggggggaaaaaatttttaaaaaattttttgcccccaaaaatttttttttttaaccttggggggggggaaaaaaattttttgaaaccccccggggtttgcttttgaaaaactaaaaaaaaatttccccctttggggggggttaaaggggtttgggaagggaaaaacccccccttttattaaaaaaaaaaaaatttttttttggggaatttttttaaagggttttttggaaggggggggcttagggggggttt

SEQ ID NO: 61193 - DNA, 382 bp, Homo sapiens
acttttttttttttttttttttggccgggccaaatttttaatgggggggggggcttacccccccccccccgtaacacaatttggggttaaaattttgggaaaagggggaaatttaaccttttggcggggccccaaaaaatgggggaaccccccccccaaaaaggttgccccccccttggggcccccccccaacaccttaatttttattttcgggaacccggacccccggggcccccttttggaagccccccaaaaccaccctttcaattggaaaaaacccccaaaggcccccaagggggccatttcccttttaatttcccaggggttggactcccaggggggggggggtttggcccccaagggggggttttgggcctttttt

SEQ ID NO: 61194 - DNA, 378 bp, Homo sapiens
acttttttttttttttttttttttttcccttttttccccaaaaatgggtttttttttcttttcccccaaaccctatttttaaaaaacctgggttccggaaaaccttttggggggttttttccaaaaatcaagaaacccctttttgggaacccccggggccccctgaaaattaaggcctccccccgggattaaaaaaaattttttttacttaaagcccaaggcaaaaactttaaggggggaaaacccttgggtttaaaaaaactccccaaaaaaaagccctttaattttttaaaaccaaccttttttttttagggccttcaaaattttttaaatttttaaaaaaccccttggcctaaatttttttaaaaaccccccccc

SEQ ID NO: 61195 - DNA, 368 bp, Homo sapiens
actttttttttttttttttttttgccaaccaaaaaaaaaagggggggcgggggggattcctttaaagggcccccccccccttttaaattttttttttcaaaattttaaaaaaaaaaaaattttggggggccgccccccttttttaaaaccaatggaaattggggcgtccccttgggaacccctttaaaatccaaaaaagggcccgggtttaaaaaaaaaacccttacccccctttcccttttaaaaaaaaaaaatgggaaaggggatttcccccttaaatccccccccgaataaaaattaaaaattggtagggggggaaaaattccccccgaaaaatccatttttaaacggggggcttaaaaaaaaaa

SEQ ID NO: 61196 - DNA, 307 bp, Homo sapiens
acttttttttttttttttttttttttttcccccggggggggaaaaattatttaaacccctttttttggggggcttaactttaaaaaaaatttttgggggttaaaacccccttggtttaaaaagggctttatttaaaaaaaagggtttttttcccttaaattaaaacaaaagggggtttttaaattttttatttttccccctttccttggcccttttaaaaataagggatcccccgggccggaaaaatttaatttaaaacttttttaaccccccccccttgggggggggccccgcccccaattttttt

SEQ ID NO: 61197 - DNA, 475 bp, Homo sapiens
ccagtgtgaaaacgacggccagtgtaaaacgacggccagtgtaaaacgacggccagtgtaaaacgacggcctgtgtaaaacaactgcccctgtgtgagaccagctttatttaaaataccgaacacaaaagacaatttcttagcaatgctcaacaactttcttttaaattaatatttggccgggcaaggtggctcatattcgtaatcccagcaatttgggaggccaaggcgggcatatcaccagaggtcaggagttcaagaccagcctggtcaacatggcgaaaccatgtctctactgaaaatacaaaaattagccaggtgtggtggtgcatgcctgtaatcccaacaactcgggaggctgaggcaggagaatcgcttgaacctgggaggcggaggttgcagggagctgagatcgagccactgcactccagcctgggcgacagagcgagactttgtctcaaaaaaaaaaaaaaaaa

SEQ ID NO: 61198 - DNA, 285 bp, Homo sapiens
acttttttttttttttttttttaaaaaaaacctttcaggcgggggacgggaccaaccaaaaaaaattgggggcgggttttttgggaacctttaaaaaaacattgggggaaccccctttaaaacccttgtaaatttttccccccccaaattgaaaccgggggcccccccaaaaacccccaaattgggggaacccccggggcccctttgggtttttttttcccatccgggcttaaaaaatatttttttttggggggggtcccctttgaaaagaaaatttttggaaac

SEQ ID NO: 61199 - DNA, 393 bp, Homo sapiens
acctttcttttttttttttttttttttcaaaaacacccaccttgaggggattgcaaggcggggaaaaacattcttgcgggaatttggcaaattaggaggtgagtataagacatgatctttttaaaaaacgcccatgattaaaacagggaaatattgttaggtgcctttatacttaactccattgtcttctttggggtaaaaaactaagcccaggactgggtgcaatggctcatgtttgttatgccatcactgggggaggctgaggctataagatcactttatctcaggagtgcaagatcagcctgcgcaacatagctaaacctcgtctctactaaaaaacaggctttcaaaaaacacaaaaaaagtacctgccctggcggccactctaaaact

SEQ ID NO: 61200 - DNA, 250 bp, Homo sapiens
cgcggtggcggcccgaggtacttttttttttttttttttttttttggggccgccctttccaaaaattttttttggaaacccttggcccttttaaaaaattttaaaggggttacccttttttggcatttttctttccccaaaaacccaaccttgggtcttttttccaaggctcaaaaaaaaagggggaaaaaaaaaaccccaaaaaaaaaaggggatttccgggcccccccctttttacccctttaaaaaa

SEQ ID NO: 61201 - DNA, 614 bp, Homo sapiens
ggatcgccgcgttctacgtacttcacttataggctgattgggactccaccccgctcggcggacgcgagtactttttattttctttattttttatggggagaaaacacccggggatccactagtgctagagcggccgccaccaaagtggagctccagcttttgttccctttagtgagggttaattgcgcgcttggcgtaatcatggtcatagctgtgttcctagaaccccctttgggtgggggaaaattttaaggggggggggggggctccaaacattttttagcccccccggagcgggaaatgttttttttccccaaaaaattggtttcctccccaaaaaatttccccccaaggttaaaatggggggggaaaggcaaagttaccaaggtttttttaaatctactaaaaactttttttgggaaaaaaagtttaaaccccctaaaaaaaaattattgtccacctgggattgccccctatttttaatcttctgggagaacattctgagcaaaagcaagctctgggcgatacaataacaatgtcctccctgcaacattaaaggctttgtcataacaatactgtgcctcatcaagttttaagagaaaaacaaaaataaa

SEQ ID NO: 61202 - DNA, 345 bp, Homo sapiens
acttttttttttttttttttttttcgggggaaagggggagccttttttttattttaaatttcccttaaaaaccccttgttccaaaagggggggcccttttaatccccttaaaaaattggcccccacctttttaaaaaaaaacttggattaaaaagaaaatcccaaaaactagggtgtttgggtaaaatcctaaaaggaaactttttttaaaagggggacaaaaaagggcttaaaaaaaaaaaaattgtccccccaaaaggaaacggttttaagggctcccctcaatttttttttcccctcaacctttttttttagggggcccactttacaaattttttccccccc

SEQ ID NO: 61203 - DNA, 582 bp, Homo sapiens
actgtcacccatggccctgataggaaacagatggcatattcaagctggataatttgaagaggattaaatgaaacaagtattcacaaataggtgggcagagtttagaaaatcaacaagagatattgtagtatcctgggctagcaacagagaggatgggaatattgccccatagacctgaagtgcaaagagaaggagtgctacctcaaaaagagagctttgtggagaaggctgcctgatagcagctgtagtcccaggtagagggtgagccaccacgcccggcggttattacatagttttaaaagtgactcctcttaaggaaattttaattaagagaaaaatatcctagaactatgattagggtcaaaacagtatctatgttctttaggtattaaggaaaaagtgtatctgtcctaagaaagtgtttataaggagaagagtcttcctagaacactaactttaacacagaactctcatcactactctaaaaaattaacattaaaaataatcttggccaggtgtggtggctcatgtctgtaatcccagcgctttgggaggccgaggcgggtggatcacttgagggca

SEQ ID NO: 61204 - DNA, 289 bp, Homo sapiens
  misc_feature 286: n = A,T,C or G
ggccgaggtacatatggtgcctcataatcattcagaagcagaacattggttcactcctcttatcccacagcatgggttaaagagaccattgccaagaggccttccctcttctagaagggcatcatttgttaggtcctttttccatggtttggaattaaaaaggcaatgactagaaacatatccctcatggtagactctgtagcagattctactgtaaaggctacacaacagatgttaaattctcttgtgaaagttatgctaaaaaatagaattggctaaacagganagt

SEQ ID NO: 61205 - DNA, 603 bp, Homo sapiens
ctccaccgcggtggcggccgacgtacacatgagctgactggaacctacagctaccagcctcaagcaatagtcccacgctcaaccccccaaatagctaggaacacactatgtgtgccccctcactaagactaatatttttgcattttttgtagaaatggggttatgccatgtttgccatactgatctcaaacttttgggcttatatgatctgaccacctcaccctgccaaaatgctaggattacaggcttgatccactgcactcaccctagattcataagtgatcaagtgatgtctaaacttatgaataacattgcaataatattaagaaacagggcctatgggagtcgattacatcatgagagtggatccctgatgaatgggattaatcaccttattaaaaaaaacctgagggaacttgttcctcactttcaccatatgaggacacctagaaggcaccatctctgaagcagagagcaaaacctcatcagacactgactctgctggcaacttgaccttggtcatttctgcttccagaactgtgactaatatatttctgtcctttataattactcagtgtaaagtattttgctatagtacctgcc

SEQ ID NO: 61206 - DNA, 484 bp, Homo sapiens
actttttttttttttttttttttccccctttttgttttttttttcccccaaaaaaaaccaaattttggcccaccccacttttttttaaaatttgggaaaaacccggggaccccgttcccgggggcccttagggggggtttttgggggggccgggggtcccaaatttttccggggggttttaatttggggggcggggttaaaatttaaattttccaagttgtttactggggggaaacccctttttcccccccctatttttccgggaaaatccaaaaaaacttcccccccttttttgtttcaaaacctgggggggccggccccgggcccttttttttttttaaccacccgggggggcccctttttttttccctttttgccggggccccttaaaaacggtttcttttttttttggcccccccttggggggggaaccccaaaaaaatcggggggggggccccggtttccttcccgggggggcctttgg

SEQ ID NO: 61207 - DNA, 298 bp, Homo sapiens
  misc_feature 51: n = A,T,C or G
actgggattacaggcgtgagccacagcgcccggcctccttcactaatttanatggaaaaatggtttggcaaatggaaaggacttatgtcctcaatccttacttctcttgcctttgtaacaggtgtgcttattcttgtaggatgttatatcataccctgtgccagaagcctagcacaaaggcttattgaaacagctcttattaaaacctttttcaatctccccaccaccttattcagataagctcctacttttagaaaaccaggcagaataacagagtcaagaaatgttaaaaacgttt

SEQ ID NO: 61208 - DNA, 300 bp, Homo sapiens
acataactgtgggtatgcattgctgttctattgtggagtgtagtttggctggatacatactttcctattatttttctcttgaattttgaaagtcagaaagctaaaaatgcaaaaaatccagtctaaatattgtctatagttttttaggattatagtgtaatctgctcttttaacttatgtatctctacagcctgccaccatataagcttttaattataaaattatgatgcttgacattggggagaaaggaacataagcacccataatgagtcatttttgttgactgtataaatgagtcag

SEQ ID NO: 61209 - DNA, 576 bp, Homo sapiens
actttaaatgcttttgtgtttttgtatatttatacctgttttagttcattttctgctgctatagcagaatgctacagcctgggtaatttataaaagaaatgtatttggctcatggttctgaaagctggtaagtccaagaatatggcccagacatctggggagggcctcatctcatggtggaaaggcgataactaacctactcccatgataatgacattaatccctttataagggcagagccctcatggcctaataagttcctgaaggcctcatctcctaatacgatgggaattaagtttccagcacattaactttaggggacacattcaagccatagcaacacctttcattgtctttattgatatgcagggaagtttatcataacagttaaaatttttcctcatttggtattttcataagacctaagaactaatggaatctaagaaatagaaaatattttaatggtggttagtattaagggtttaatacttaaacagaattattaatagcagcattttaaattgatcaaatcttagtgaagttccatgaaaaactaaagcttcattcatttcacct

SEQ ID NO: 61210 - DNA, 124 bp, Homo sapiens
aggctgaaaccctaaaaagcctaaaacctccctgcccgccctttattttttaaacaaaaacccacacacacccgcccacacacacccccccaaaaaaaaaaaaattggccccccgggaattttt

SEQ ID NO: 61211 - DNA, 271 bp, Homo sapiens
actttttttttttttttttttttaaaatttttaaaaaaaagagggggtttcctttttttgggaaggagggtttaaatttcctaccctaaaaaaacccttttttggccccccaaaagggtgggatttacgggtttaaggccccccccccccccttttttttaaatttttttttttaaaaaccccaaaatttttcaaagggggctaacctttttaatttcccatgggcggggcatgagggtttaaaaactcccactttttcccaaaggggggt

SEQ ID NO: 61212 - DNA, 492 bp, Homo sapiens
actttttttttttttttttttttttttagagggggcccctttccaaaaatttttttttggaaacccttgtcccttttaaaaatattttaaaggggtaaccctttttggcaaatttccttaacccaaaaaccaaactttgggtctttttttcaagggccaaaaaaaaaaggggaaaaaaaaaaacccaaaaaagaaagggggtttccggggcctcccctttttacccttttaaaaaaaatgaaaaaattttttttttgggggaaaccccccccgcccaaaaaaaaaaggcttgggtttattttaccccttaggggtttaaggggattaaaaaaaaccccaaaggggcctaaaattttggggccttatggaaaaaccacccttttcccaggggggggttaccctaaggggtttgggttttccggggggcccttgtttcttttggggaaaaacctttcagggttggggcaattttaaaacaaaatttttgggggg

SEQ ID NO: 61213 - DNA, 320 bp, Homo sapiens
  misc_feature 17, 29: n = A,T,C or G
tccaccgcggtggcggnccgaggtacttnttttttttttttttttttttttgaaaaaagggttttttttttttccccaggttttaaggcaggggggaaaaaaaaattaattggccccttaccccaaaaggctaaaagaacccttccccccaaccccctaaaaaagggggaaaaaaaggtttttttttccccccaacccaaattttttggttaaaattttttttaaaaaaaaaggggggtttaatttttcccccaaaagggggggaaaaattgggggcccccccctggccccccaaaagggtttgaattaaaaaaaggggg

SEQ ID NO: 61214 - DNA, 158 bp, Homo sapiens
gaaaactagttttttttaaaaaggggtttccggttaaatttttttaatttggggggaccccttgtttaaccttgttttttttccttaaaaatttttaacccttttttttggggcttttttttttaatcccaaaattgtttaaaaaattttttttgggg

SEQ ID NO: 61215 - DNA, 295 bp, Homo sapiens
actttttttttttttttttttttttgggaaaaaggggggaaaaaattttttttttttttaaaaaagggtcccctttttccccccaggggggaattaaggggggaaaaaaaaaccaaaaacccccctatttcccccaacccaagggaaaccccccccccccaacccccaaaaaagggggaaacaagggccaaacccggcaaatttggcctttttttaaaaaaaaaaaggttttcccttttcccccaaaagggtttaaaatccccaaactaaaaaaaattttttccccgggccctaa

SEQ ID NO: 61216 - DNA, 557 bp, Homo sapiens
accattcaccgaattgggaaaggatgtgggagttttggaagaacaaaaattgcaagttggattttgttaagtttgagatgcctgttagatatctaagtatataggttaaataggcaattatgtatgttaatctggaactcagatgttctggacctcagatatgaattgagagttctcagcattcacattggaggttgaacatgtgggactggatgagatcaccagggaaggagtgaagatgaagaagagaggggtatgcttaactgagtccataaggcctagggtttggtgattgaacaaaaaaggaggaaggagcaaaagggactcagaaaaaatttccaatgaagtgaaaaaacgcagatttgtcatgttcagaaatagagggaggagaatatctcttagaggaaatggagagaggagaatgtttctaagacagaatgatctactggattgaattgggctgaataaccaaataggatgacacagcacactatttttgtaattccacagcttggacattcctggtgatttttggaaaaaaaaaaaaaaaaaaaaaa

SEQ ID NO: 61217 - DNA, 537 bp, Homo sapiens
actttttttttttttttttttttttttccctaaaaaaaaaaaccccccaaaaggaaatttttaaacaaaaaaagggcccccttttccttcaaaaaaaaaaaaaagggggggtttttttttaaattgggggccaaatttaaacctttttttttcccccggggggggggggaaaaattttttccctttttcccaaaagggggtttttaagggaaaatttttgaaaaaaaagggggggcccttaaatttggcaaatttttaaccgtttttttttttcccgggggggaatttttaaaattccctttttttttttttccccccctttttaaaaacccaaggggggggtaaaaaaaaaaatttttttgggtttaccaaaaaaacccccggtttccccttttcaaaaattttctaaaacttttttttttgtttaaaaaaggggggttttcccccccttttttccaaggggggttggaaaaacccggggagggaaaccccttttttgttgtgaaaccttggacccccttcccagggtaaaaaaaa

SEQ ID NO: 61218 - DNA, 288 bp, Homo sapiens
acttgtgtatcatttcagcagctgtgttacagacttgaagacataacctcaaagcagttgttctctacctctctgctgggtttctctgtgcataatggatgcttgctgttatttgtaataaatagataagtataccgatgctagacctgtcccttgatttttcttttttttttttaaagtaaaattaaactctgctaatgtctggggtttttaaaaaatgtagttctttaatatccaaacttactgatagtttaaggttatgggcaaaaaaaggtttcctaaactgaa

SEQ ID NO: 61219 - DNA, 264 bp, Homo sapiens
acttttttttttttttttttttttttttcggaaaaaaaggtttccccaatttttgggaagggggataaaaaattttaaatttccggggcccccaaaaaaaaattttggcccccggggagaaaaaaccctttaaagggtttttttttttttccaaacaagaaaaaaaaccccatttttaaggttttttaaaaaaaaaaaaaacccaaataaaggccccccccctttttttgaaaaaggccaaaaaaaaattttggggcccctttg

SEQ ID NO: 61220 - DNA, 471 bp, Homo sapiens
cactctgttgtgctgattggagctccccgcggtggcggccgaggtactttttttttttttttttttttgggagcccaaaaaaattttttccccctcccctttttttttaaaaaaaaaattttcccccccgggtcggggtttcccaaaaaaaaaaaaacccccggtttttttggggggctttttttccctttaaaaccccccttttccttgttttcggccccaaccccccctttttttgcccccccttttaaaaacccccccggggcccccttggccccccccccgggggccggggggcccccctttttttttgggggggggcttttcccctttttttttttggggggcccccccccccccccgggcccccccggggcacggggaccttgggggccctttttgggggggggaaaacccgggttcccccctcaaaaaaaaaccccccccgggccccaaaaaaaaggggggccc

SEQ ID NO: 61221 - DNA, 310 bp, Homo sapiens
acctacattttcattcatatcaaagtattttctaatgtgtttgatttcatctttacctgttggttattaggagtgtgttgtttaattccactttgtattagtccgttctcaaactgctataacgaactacctgagactgggcataaagaaaagaggtttaggtcccacatgatggctcgggcctgtagtcccagcactttgggaggccgaggcgggcggatcacaaggtcaggcgatcaagaccatcctggctaacacggtgaaatcccgtctctactaaaaatacaaaaaattagccaggcgtggtggc

SEQ ID NO: 61222 - DNA, 418 bp, Homo sapiens
actctggtagagatggatatactttccaatgagatgagagattcgtccgcaaggacatgcgcacttccaagacagccaactatggactgctgtctctattcacaagataaatgtatcttgggacatctgggtatccatagggctttaatcccccaggaactactgacgcttgtcaggtgctaattcttggcccccttactgtgcataaacccctgatcactaaatatacccttggaacgcctgcatgtattactgtctatatctaaaaacctacccctttctggtgcatatgatactctgtgccactccactttctctcttgagtgcccctgctgtgtggctctgcctgactgctgctgaggggtcccgccctccccccttttttcccttttaggggggttaaatgcccccctggggg

SEQ ID NO: 61223 - DNA, 422 bp, Homo sapiens
actttttttttttttttttttttttttgggaaaaaaaaaaaaaaaaacccggttttaattttttttttttggtaaaaaaaattggttttttttttcccctttgggaaaaaggggggggcccccctttttaaggccttttaaaaaaaaaaaaacccccccccccccccgggaaatttggccctttggggggcccaaaaaaaagcccggggggccccggggaatttttaattggggggggggggcccccggggggccccttttttaaaggccctttttggggggggttttttaggccccgggaaaaacaccaaaaaaacgggggtttgcccccggggggggaacccccttttttttaagcccccttggggaggggggcaaaaaaaattgggcaaaaatttttttccccccccccccaaaaaggg

SEQ ID NO: 61224 - DNA, 376 bp, Homo sapiens
acccagtagtcattcaggagcaggttgttcagtttccatgtagttgagcggctttgagtgagattcttaatcctgagttctagtttgattgcactgtggtctgagagatagtttgttataatttctgttcttttacatttgctgaggagagctttacttccaactatgtggtcaattttggaattccctgctttattattctaaagcaagcttgtccaacctgcggcctgtggcccaacacaaatttgtaaactttcttaaaacgttatgagattttttttgcgattttttttttttttttttaccccaccacctttcgttagggtaaaggtatttttggtttggttttgtttgaaaacggatttttgtttttttg

SEQ ID NO: 61225 - DNA, 299 bp, Homo sapiens
caccgcggtggcggccgaggtacttttttttttttttttttttttggccccttgggaaggggggggggggggatttttgtttaaaattttttaaggggggaaaaaaaaaattttaaaggagtttggggggaattttggggcccccccccggtattttttagggggcccttccccttaaaaaagggggggggcccctaaatctttacccaaaaagggtaaaccctaattacccttcccagggccctaaaaggggggaaagggggcccctaagggaaaaaccccccccctttacaaaaatt

SEQ ID NO: 61226 - DNA, 582 bp, Homo sapiens
  misc_feature 353: n = A,T,C or G
acgcttcccttggcaccatgttataccatctgtgctgggctgaatagtgtccccccaaaattgaataatgtccccccaaaattcgtgtataccctgaacattagaatgtgatcttacttggtattacttggtatagggtgttgtagaaataatcaaataaagatgaggtcatactgcatcagggtagaccctaaattcaatgaccaggatttttataagtgaaaggagaggcggattcagagaaaaagacacagacacacacagagagaagacagccatgtgaagacacaagcataaattgaagtgacacagctacaagccaaggaatgccaaaaattgctggtaaccaccanaagtaggaagaggcaaaggggagtttttttccagagaccttggcgggagcatggccatgccaacaacttgatatcagacttgtaatccctacatctatggcagaataaatttgtgttattttaagccactaagtatgtgctaatttcttatggcaaccctaggacattgatgtgccattggagtagcctgttaccactttgagaacaagaagctcactttgatgctccc

SEQ ID NO: 61227 - DNA, 275 bp, Homo sapiens
actttttttttttttttttttttttttcccccccccaaaccaaaatattaaaattttttccccaaaacaaggggaggggggcccctgtttaaaaaattttttttaaaacccccccgggggggggagcccccccttttggggggtttcaaaattttcccaatttttttttttttcttttccccgggcctaactttttttttttgcccccctttttcccggcttaaaaaaacaaaggttttttcccccaaaaacccggaaatttttttaagggcccc

SEQ ID NO: 61228 - DNA, 430 bp, Homo sapiens
actccagcctgggcgacagtacgagtatccatctcaaaaaaaaaaaaaaaaaaaatccttgggttttagggggcccccccttttggccccaaactttggggaaacttagggcaaagggttccttggcccccaaaatttgggggttcggggggcccttttttttccccctgtttcccaacgggggggcaaagaaagattcccacccccaaaaaaaaaaaagggttttgggtttaaaacccctggaaagggtttaagttttggggaaaaaaaaataccctggccctttttggcccggggccaccacctgggaaaaggggggatttttaaaattaactttccgggaaaaaaaaaaggggggggggggggcccaaaaaaaccccccttttttcccgtttggaaatttttttctttttggggggaaagggggggg

SEQ ID NO: 61229 - DNA, 493 bp, Homo sapiens
acttgatgaacctgtttcattttctcgtcctccctgaaaaggtttaccccaggcagtctggctatcagtgcagtggacctcacatctatgttggttatgtaggtggatggatgaaactaggtgggcctatgttccatcttttttctctcttttaggtagatgacagatttcccaagggagtgagggtctacatagtagcatcattctgtatgtgctgtgagatcagctcttggccaaagtaggctcaaatctacatggattagcctaggacctactttctcattattaccatctcaagaatgggtgttgtcattcaggttggtagtttttccctggtttctctaactgagctaggtcagaaaaaaaaaaaaaagaaaaccttaggccctctttttttttttttttgaaatccccaagggaaaaaattttttttccccaaaaaaaaaaaaattgggtttctgaaccccggaaaaaaatctaaagggaaaaaaaa

SEQ ID NO: 61230 - DNA, 592 bp, Homo sapiens
acttttttttttttttttttttttggcaacccccccttgtaggggttcctttttggggaaaaaaccccctgggggaaaaaaataaattggctttttttaaaaaaaaaccccctccgtttttttttttaaaaaatccccccaatttttggcggaattttttttgggttttcccccggccaaattttttttttaggcccccccccccttttttttttgggcccaaggggaaatttttttaaaggggaaaaaaaaaggggtttgggggcccccccccagggccaaaaaacaaaaagggttgggggggggaaaggaaccccagggttttttttttttttctttggaagggaaaaaaccttttggggggggttgggtttcggccccccttttttatttaaaagggggaaaaattgggggccctttaaaccctttaaaaccgccccaaaattttccccaatttttttaaaaaaaaaaaaaaaaaaaaaaaattccccccccggcccttttaaaaaaggggaccccccggggccgggaaaatttattttaaatttttttcaccccccccccccggggggggggccccgacccctttttt

SEQ ID NO: 61231 - DNA, 447 bp, Homo sapiens
actttttttttttttttttttttcccttcccccctcccccggggcccaaaaaatttgccctaaaaaaaaccctccccggccatttttccccaacttttttttttttttccccggaaaaaggaaaaattggggggttgggggggggggatttttcctggcccctttaggccccttttaaaaacctttttaaaacccgggggtgggtgggggtccccacttatttatccccggaaacccggaaaaaaatccccgggggtttcccaaacccctgggttgaagggttttcccccccaaaatccccaattgggggcctctttggggattttttggaccccctaaccccaaaaaaatttaaacccccggatcccttccccaaaaatgcaaatttcctttgaaaaaaaaaaaaattttaaccttattaattttccccttcccacccttttttta

SEQ ID NO: 61232 - DNA, 247 bp, Homo sapiens
tccaccgcggtggcggccgagtactttttttttttttttttttttgggggggggggtccttggggccgaccctgtggtttaaaaagttttttgaaaaaaaaatttcccttggaaaacccttggcccctccaaatttcctggttttccacgggccaaaggggggtttaccccccccaacccaaagggggccttggggaccaggattttttttttccccatttccttggtggggaaaaccccccccccg

SEQ ID NO: 61233 - DNA, 459 bp, Homo sapiens
acttttttttttttttttttttttttttttttttttccttttaaaaaaaaaaagtttaaccaatggggttttaaaattttaaaccccccggaaaattaaaaaaaacgcaaaatttttcggaattttttcttggggaaaggggggttaaaaaaaaattttaaattttggaaaaaatttaaaggggaaggggggtttttttcccccctttaaaaaaaaattaaagtttggcccgggttttaaaaaaaaaaaggggaaaaaaaaatttccttccccaaattttaaaaaaaatttgtcctttaccccctgggggggggttcccccccttttgtttttaacccccaaaatttttccccccaaacctccctaaaaattcccagtttaactttttttccaaaaattttttctgggaaaaaaatccccaccctggggcctttaaaaaaagggagccccccggggcgg

SEQ ID NO: 61234 - DNA, 464 bp, Homo sapiens
  misc_feature 17, 18: n = A,T,C or G
ctccaccgcggtggcgnngccgaggtactttttttttttttttttttttttttaccccccttaaaagggtttttcccaagggccaaaaaacctttcccttttggacacaaacataaaatttaacaggggatttaaaggggttttggggccaatttaaaagtaaaccaaaaattttttttggaaaacccatttttacccagcctgggggggtttccccccccccccaaaaaatccccccatttttttccaaaaaaaagggggggcctttttaacctttttaaaagaacccccctggtttcggggggttaaactttgggtccccctccaaaattttttttttttaattttttttcccaaaaggtttgggggaaaccccccccaatataacccggggaaaaaattttaaattttcccttgggggacccccccgggggggccttttaaaaaatagggaaccccccggc

SEQ ID NO: 61235 - DNA, 311 bp, Homo sapiens
accatgaatcacaagctctattggctgagactctatttgcctagaattagtctcatgcttttataggagagatacaagctaagaaataaaattaaatgaggaagataaacattggttccatgttaaaatgtatttgatggcatggaatttgcaagacatcaattttcagcctagcagattacagaataggatccattaatcctagtcaacattgaacacttcagaggaacaagaacatgacacctgaaggcgagtaatgcatggaaatactcacgatatgttcctagaaaagctgaagaagagaatgaact

SEQ ID NO: 61236 - DNA, 168 bp, Homo sapiens
acaggtttgtgtgtgcatgtatacgtgtgtgtgcacaggaagcatttccacttgagggaaatcctgccccatcatgcctacctccacaatgaaatcactcgttttttggtgtttgctcgcctaactgacttgaaccccattttatttatttagtttttttctcatggc

SEQ ID NO: 61237 - DNA, 350 bp, Homo sapiens
actttttttttttttttttttttttttctggggaaaaaaaattttttttttttttttccaaaattggggccggggcccccttttaaaaaaccccctttttgggggccccccccaaaactttttttttggggcccccccaaaaatttccctttttttttccaaagggccaaaaagggggggtccccttgccccaaaaaattttaaaaccttttttaaaccccttttaaaagggggggttgggggttttaaccccccaaaaaaacccaaggggggggggggttttttttttttttgggggaaactttgggggccggggaaacttttaaaaacccatgggggcaacttttttt

SEQ ID NO: 61238 - DNA, 299 bp, Homo sapiens
gcggtggcggccgaggtacttgtgggggtttttttttttaaaaaaaaacccccccaaaaaaaaagaacggggcccgggtttttttcccaaactcacccaaaaacggggggccgcccccggggccccaaagcccagcctaaaaaaaaccggggcccgggaaacccgggtttttatttttttttttaacccgggaaaccccttggggggaccccccgggaaaaaggaaaaaaaagggcgccccccgggggtaaaaaaaaatttttaacccaagggcccagggaaaaaccataaggggggaa

SEQ ID NO: 61239 - DNA, 235 bp, Homo sapiens
actttttttttttttttttttttttttccaagggttccggggcgggaaataaagggctttcccaaagggggacccccccttttttatggccccaaccccaaaaaaaaaaaaattttttaccccaacccttttaagggggggggaacaaagggttttcccccgcccggggttttaaaaaaaaaaattggtttttttggcccccccttaaaaaaccggaaatttttttgaaaaaaaa

SEQ ID NO: 61240 - DNA, 448 bp, Homo sapiens
acttttttttttttttttaaagggatttttgccctccacccggggaaaaaaaaggaaaatggttccttgtttccccttccacattccccccccaaaaaaagggggggaccttattggattttggataaggtaaagaaaaggtaaatttttttaacgggcttgtgggggaaaaaattgggaaaaaaatatttttcattttgatttggcgggttttttacaggaaaagtaggggttttttaaaagggaaattttgttacggggttttaaaaattttaaaaaaggaaaaaccttaaagccctacctttgatttcccttaaggtggaaagtacctgggaactacctaaagtcctttctaaagtggcttttttggattgaactactaactttttcaacagtttgaacaaaaaaaaaaaataaggtttttgcaaaaagccaggggttttaaaac

SEQ ID NO: 61241 - DNA, 402 bp, Homo sapiens
  misc_feature 17: n = A,T,C or G
tccaccgcggtggcggnccgaggtacttttttttttttttttttttttttaaaaaaaagggggttttccctttttccccggggggggtaaaaaccccggggctaaaaaaaattcccccccttggccccccaaaagggggggattaaaaaaaaaaaccccttggcccggccaaaatccttttttaatttaaaaaaattttttaatttaaaaaaattttgaccaaaaatttaaatccttgaagggtaaaattttttttttggcccccccccccaaaggaaaaaatttttttaatttttccaaatttggcccaaaaaaaaaaaaattttttggaaagggccccctaaaaaagaaattcaattcctttccaatttgggaacccccacccaaagggggtccccttaa

SEQ ID NO: 61242 - DNA, 408 bp, Homo sapiens
acttttttttttttttttttttttcattttaaaaaaaaaaaaaaccttttttttttcaaccctttttagggaaagggggggaaaacccaaaaaaggggggggggttttttttttttaaccccccccccgggtcaacccccaaaaaaaaaccccttttcatcccccccccaacaaatttttttggggttccaaggcccccttaaaaataatgggaaaaaaattaaaaacttttggccaaaaaacctggcccatccccccaaaaaaggaaaaaaaaaaatttcccaaggaaaaaggccctgggccctaattttttccccagggggggggtaaaaaaaaaactttggcccaacggaaaggggggggaaaaaaaatgggggtcccttaaagggactttcaaaaaaaaaaccc

SEQ ID NO: 61243 - DNA, 458 bp, Homo sapiens
acttttttttttttttttttttttttaaaaaaaaagggggttcccccgtttaacccaggggggttaaatttcccgaccctaaaaacccccccccttgggcccccaaaagggggggattaaaggggggaacccaaacccccggcccaaaaatttaaaaagctgtttttttttttttaaaaaaaaaaaaaaattttttaaaaaccttacttattttggggaaaaaaattaaaatttttttttaaacctttttgaaaaaccccccaaaaaattttctgggcccccttaatttaagggctttaaattaggggttgggcattaaaaaggggttttttttttccccaaacctttttttttcccccaaaaagggtttttttttttccccaaaaaaaaaaacttttaatttttttttttttttccccggttccttgggccttttaaaaaaaagggatcccccgggg

SEQ ID NO: 61244 - DNA, 145 bp, Homo sapiens
acttttttttttttttttttttttttcggggagggggggggatccccaaaccctttatcaaacgggggcgctttttagccccaacttggggggaaaaaatttaaccttttttgcacgggtttttttataatggcaaaaaactttt

SEQ ID NO: 61245 - DNA, 306 bp, Homo sapiens
acttttttttttttttttttttttttttaaaaaaaaaaatcccctttttccccccagggggaattgggaactgggggggccaaatttgggttaaagaaaaaccccccccccggggcaaaacccttttttcggcctaaccccccaaaaaagggggaaaaaaaggcccccccccccgcccggggaaaattttttttccccccggaaccctcccggggggggcttttaaaaaaaaaggaaccccccgggggggaaaaatttaaaaaaaacttttaaaaaccccccaccccgggggggggcccccgcccc

SEQ ID NO: 61246 - DNA, 312 bp, Homo sapiens
actttttttttttttttttttttttgggccccccctttccccggggggggggaaaaacccttaacccccccccccaaagggacccccccaaattcggggaaaaaaaaaaagggccttttttttttttttaaaaaaaaggggttttttttttttcccaaggttttttaaaaacttcgaacctaaaaaaaccttttttcctagggccccaaaaggggggggtttccccgggggaaaaaaaaaattttaaagggggaattttttctttcccccgggggggaaaaaaaaaaaaaaattttcctttgccaaaaaaaa

SEQ ID NO: 61247 - DNA, 288 bp, Homo sapiens
acgcactttcaaacaagctcagtgagaacagagcctccaccaaccttcggatctctgcatcagtaaatccctccacgaggtccttccgcacactcctcggacgccctctgcgctttggcttcttgtcatcatcagagtcttccgtttcactctcagaagcagaggatctctgggcctgcctcttagactcagtgtcagagtcactgtcatttgtctgagcctgagaaagatcgaggcaaagtcacactgtaacaagtgcgaagttcaagtggtgaaaggactaagagc

SEQ ID NO: 61248 - DNA, 516 bp, Homo sapiens
  misc_feature 372: n = A,T,C or G
acttttttatttatgtatttttttccccagtattttatttactggttgaatagttcaggcttcaggccagtagagggggtgtccatgggtagaaaccagttgtggctaaagcaggtggataaatgccatacccaatggagggcagaagtcctagccttgacagaggtggctgggggacctttcagtgaaatgcactgaggtcttatcaggaggaagtgtgggagctaccttcactcccctgcgaggccagcatgaaagctatccacctcccagacacacttttaactcagtgttctagctattcagattagacaggcacctctttttatctgcaggaatgttaatgttccaagtaaagaggaattgtgactntatgtctcatgccagcctgaacctgaaggatgctccttctgtggggatgcagtcaccctgaagttttccacgaagtcttttatagggatacccatgccaaactcctgtggaagagcttcagctgtgtctgcagcggtggatgag

SEQ ID NO: 61249 - DNA, 313 bp, Homo sapiens
  misc_feature 31, 277: n = A,T,C or G
acaactaaagcttagtaaagaaaggtcaggngagaaactgatttgggaatcatcctcatttaaagccgtggaaataaatttccgaggggaaacgtatttcatagatttttcccaaggaaggagatacgtaaattctatatttgtctctctgtgatggagaacaaaggacatagaattaaggaattaaccttagagaatgtttacattttaaagagtggagaagaatcaaagagtagtcaaatatgatagaaaatcctgggcgactatttctgagttntgttttgttttgtttttttgcccttttagtagctct

SEQ ID NO: 61250 - DNA, 389 bp, Homo sapiens
  misc_feature 17: n = A,T,C or G
tccaccgcggtggcggnccgaggtactttttttttttttttttttttttttttaccggggggtggggatttaaaaacccgggggtttttaagggcccttttcctttaaaaaaaaaaacccccaagggggtttttttttttgggggggaaaccccccctttttggggggggggtattttttttggttaaaaaaaaaaaaacgtttaccccttgggggccctttttaaaggggcccttattaaagaaaaagggttttttcccccttttcccgggggggggcccccggcccctttaaaaaaagggggccccccggggggggagaatttttttttaaactttttaaaccccccccccctggggggggggccgggcccccattttttttccctt

SEQ ID NO: 61251 - DNA, 469 bp, Homo sapiens
actgaggtgggtctagaggattagtctgtgaattgtagcctggattctgcagttgtggggtctgcctggtgctgagttttactgtggtggactcagtgttgggatccagcggaaaatcctgtgcttactttcctctcttcctgccaagtggagagtatgtcttttcatgctctgctgcctggaattggaaaagaggtgatttggataatgtaaaactgtccttcctatcctcttcaacgtatcttttattattattgtgctacaaccagacactgtgatctttcatctggttttcttagatgttgtaaagatattgtgtgcatggaccaggtatggtggctcatgcctgtaatcccattttgggaggccaaggcaggaggattgtttgagctcaacagtttgagaccagcctgggcaatatactggaccccacctctataaaaaaaaaaaaaaaaaaaaaaaaaaaacc

SEQ ID NO: 61252 - DNA, 377 bp, Homo sapiens
atcgcgtaaaacggacttaccttggtgtgccgaattgggagactccaccgcggtggcggccgaggtactttttttttttttttttttttttttttcccaaaacccccccccggggggggggggggaaatttccccccccccccccttttttgggggggggacccctttttaaagccccctttccaaaaaaaaaccctttttccccccccccccttttcccctggggggggcggggaaaccccctaaaaagtttttccccgtttccttccggggggggctttttaaaaaaaagggatcccccgggggggaaaaatttaatttaaacttttttaaaccccccccccctgggggggggcccggcccccaatttttttttc

SEQ ID NO: 61253 - DNA, 501 bp, Homo sapiens
actgttatacaaaatgttgtatttataattattattactactagtagtagtagtagtgttagcagtagagatccccctgcctcggcctcccacagtgctaggattgtaggtgtgagccaccatgcctggccagtttttttctaatattaaacaatagaaatattcatctaaatcaatacatattaataacaattaaatgagcttcctaaatatgctgtaaaatttatcaaaaattggagggcttaaaacaataggtaatttttttttcacagttctggaggctagacatccaaaatagcagagccacagacagcctgcatattctggggagactctttcctagcctctcccagcttccagtgcctcctggaatttccaagcttcctttcccgaatcactcccatctctactttcttggtcactttgcctcttcttcttcagatatctctcctctgggtatcttttaaggtcattttttattggatttagggccctcctgga

SEQ ID NO: 61254 - DNA, 278 bp, Homo sapiens
acaccttgcctttatacgttttaaggagacataatacatcaagcaatctatgtgagatttacattggttcaatctggaagagtggagacagctggaagtgggggtgaggtagagatggggattccaaatcatagctggattcaaagatattctgattggtaatttgctgaaagagctattataaatagaaaggaatggctgggttaaaataaagggttgtggagaccaaggttttatcatgccgatgaagcctctaagtagcaggcttcaaaaagaaa

SEQ ID NO: 61255 - DNA, 395 bp, Homo sapiens
actttttttttttttttttttttttttcccccccaaacccaaaaaaaaaaaatttttcccccaaacccggggagggggggcccctttttaaaaaatttttttaaaaccccccccggggggggggccccccctttttggggggtttccaaattacccaaattttttttttgccctttcccccggcccaactttttttttttgcccccctttttccctctcttaaaaaaccaagggtttttccccccaaaacccggaaaattttttaagggccccccttggttttacaatcttttggggcccgcgcccaaaaaaaatccttttttttccccccccgttaaattttttttaaaaaacctataatgtgtttaaaagaggggtttttttttattaaaaaa

SEQ ID NO: 61256 - DNA, 120 bp, Homo sapiens
actttttttttttttttttttaaatggaaaaaaaaaccttttttttttggccaaagtgggcctaaaaaaaccccctaaaaaaattggctcccctcacaaccctgaaaattgggttttaaa

SEQ ID NO: 61257 - DNA, 192 bp, Homo sapiens
acttttttttttttttttttttttttttcctcctaaacacaaaaaagtaaaatttttgccccaaacccagggaggggggccccgttttaaaaaaatttttttaaaaacccccccggggggggtgcccgcccctttttggggttttcaaaattaacaaaagttttttttttgccttttcccgggcccaacctt

SEQ ID NO: 61258 - DNA, 428 bp, Homo sapiens
tccaccgcggtggcggccgagtactttttttttttttttttttttttgggggggggggggtaaacccaaaaccctttttaaatgggggggttttttaacccccacaaggggggaaaaatttttaccctttttaaaaaggtttttcccaagggccaaaaaaactttccctttttggacaaaaaataaaattacaagggggttttaaggggttttggggccaaattaaaagggaaaaaaaaattttttttggaaaaaacatttttaaacagggtgggggggtttgcccccctccccaaaaaattcccccaattttttccaaaaaaaaaggggggcccttttaaacttttttaaagaaacccccggggttgggggggtttaaactttggttccccttaaaaagttttttttttttaatttttttcccaaaa

SEQ ID NO: 61259 - DNA, 106 bp, Homo sapiens
tgggcacagcatgtcaatacatgctagacctccagatttaaaactataatcacaactcaaagggcaatgcaaaaacattaaggtggtaattactctagaccttgaa

SEQ ID NO: 61260 - DNA, 319 bp, Homo sapiens
tccaccgcggtggcggcgcgagcacttttttttttcttgattttttattcctgcaaaccgggggattttctatttttagaaaagacgcccccgttgaggagctcccccttttgttgcctttattgagggtaaaaaaaaaacttggcttaatgggggtcatacctgttttttgaaaaagggcccccgccttttttttggggaattttgaaaaaaaaaactttttgaccctttaaaaagggaaaaaaaaagggccctaaaaaagggggcccccttgggaataacccattttttcccccttggtttttttgggaaaaaaaaa

SEQ ID NO: 61261 - DNA, 263 bp, Homo sapiens
acttttttttttttttttttttttgcccggctttaaaaaagggaaaatttttgggggggggggggaaaaaacctttgggaaaaaaaaaaattttgaaggggaaaatgggaaaaaaaaattcccttcccggggggcctttttaaaatttggggtccccccgggccgggggattttttttttaatttttttaacccccccccccctgggggggggcccggccccccttttttttcccttttagggggggttaattcccccctggg

SEQ ID NO: 61262 - DNA, 371 bp, Homo sapiens
  misc_feature 1, 43: n = A,T,C or G
nggatatcgcgatcatagtacatacttgttgtgccggaatggnagctccaccgcggtggcggccgagtactttttttttttttttttttttaaaaagggaattttcttttttcccccaaggtggaatggaaggggaagaatttgggttaattgaaacccccccctccgggttaaacccttttttctgccttaaccccccaaagaagggggaataaagggcccccccaattaccccgggtaaatttttggttttttaaaaaaaaagggggttcacccttttaaccgggaagggtctaaatccccaaacctggaaacccccccccctggccctccaaaagggggggaataaagggggaaaccccccccccccg

SEQ ID NO: 61263 - DNA, 240 bp, Homo sapiens
tccaccgcggtggcggccgagtacttttttttttttttttttttttcgcggtttttaaaaaagggaaaaaatttttatggggggggtaaaaaaaacatttcaggcaaaaaattaattttttttgggaaaaatcaaaaaaaagtaatcctcgcccggggggcccctttaaaatattggtctccccccgtttagaagattttcattttattttttattatcccttgtcccacaggggggggc

SEQ ID NO: 61264 - DNA, 308 bp, Homo sapiens
ggactccaccgcgtggcggccgcccgggcaggtactttcttttttttttttttcttctaacgggcggacccccaaaaatatagctttggacacccctgtgcccccttaaaaacttttaaaggggtgccccgttttggccaactctccaaacccaaaaaccaaaccttgggtcctgttttccagggccaaaaaaaaaaggggaaaaaaaaaaaccccaaaaaaaaagggggttcccgggcccccccccttttaccccctaaaaaaaaagaaaccaattttttttttgggggaaaccccccccccccaaa

SEQ ID NO: 61265 - DNA, 321 bp, Homo sapiens
tccaccgcggtggcagcggccgcccgggcaggtactttttttttttttttttttttttttaaaaagggggggattttaaatcttaaaaacctaaaattaaaaaaaccgcttttttaaagggtttttgggccccaaaaaatattttaaaaccggtgggcccaaaaaaagggccccccttttttccccggttctgccctgaaaattgtatttttttaaaaccccaatttaggggttttttgggctcgcccctcttttttttttcccacggttttttacccaaaagggctttttttttcccccccttggggcccggggggaaac

SEQ ID NO: 61266 - DNA, 509 bp, Homo sapiens
  misc_feature 18: n = A,T,C or G
actaaaacacaaacacanccactgaagaaaccagactaggaatttcagcattcattcgatgtttctggaagtcaaggaaagtagccaattaaaaaataactcaaacactgcctcttcttcatgttcagcaagcacgagattaatggcagaatggcttacctgggacagggttccttcttgaatttaagttttgagaatccaaaatctcttctgtttgcccatctgcttctacctctattttgttctgaatctcttttgcatcttcactaaggcaagttcttatgctctcgtcctcctctaggactctctggactgtgatggcagcactcggagaactaacagtagtggcagcagcaggaacaatgactggagtgtgaggaagaaaagctggaggagttggagggagttggaggaaaggaaggaactgtggaaggggtgttgggagctgggatacactccagtttcatttctttggggggatttcgagaatctccaatcaagaatcaatg

SEQ ID NO: 61267 - DNA, 308 bp, Homo sapiens
actttttttttttttttttttttttttttttttttgggggctcccctttttttttttttttggggggtttttgggaaaaaatcctttttaaagggaaaccccctttaaaaaaaaattttttttttaaaaaaaaaacccccttttttttttttttaaaatttaaaaaacccccgggaaattgggggggggcccccccaatttattttccccccaaaaaaaaattttttttttttttttaggggggaaaaccccctttttaatttttcccacaaaccccctttttttttccaacggggggaaaaattttt

SEQ ID NO: 61268 - DNA, 332 bp, Homo sapiens
acttctgtcagcagaattatagtggaacgtgcagttcaccctaggggacagtaggtggcacttgcaggtaaattccaaccaaacgctgaacagtagtgtcagcagaaattgtgatgagttgtgcaggttgacctcctggtcagtagatagtgctttcaggcaagaggcagtttcagtggtagtagtggaatttttatttgacctttgttgatcagaggaagcactagtgtgtcccaggtgatgtgtgaggccatggggttttcaggggtccccatccggggttctgacacaaagggaactagagaggacaatatgaggcagggttggatggt

SEQ ID NO: 61269 - DNA, 280 bp, Homo sapiens
acttttttttttttttttttttttttttttagagggccccccttcccaaaaatttttttttggaacccctttccccttttaaaaacttttaaaggggtccccctttttggcaattttccttatcccaaaaaccaacctttgggtctttttttccagggccaaaaaaaaaaggggaaaaaaaaaaaccccaaaaaaaaaggggttttctgggcccccccctttttacccttttaaaaaaaagaacccaattttttttttgggggaaaccccccccggccaa

SEQ ID NO: 61270 - DNA, 306 bp, Homo sapiens
tccccgcggtggcggccgaggtacttttaacaagatgtttaacttataagatttttctagttccttctttgcctaattctgaaaatgtatatgcttccattgctttggaattatgagaggtgtatatggctttgactgggaggtaagagcactgccttagcctttgctgccatggtgcagcatagaacacacacgactaggagtcaggagattgggtatgcacaccagctttgccacaaacccagctatggggaacttggataggacctagctttgctgaactatgaggtctttttctacaaaata

SEQ ID NO: 61271 - DNA, 309 bp, Homo sapiens
acttttttttttttttttttttttgggcaaaaatttcccccttcccgtttttcccattatttttgataacattaccattattttccccccgggtttaaatttcccctgccacccagggaaaatttgggggaaataccaggattcctgttttttcaaattttatttttttttaacagccttttccaaatttggggaggaactggcttttaattttttacccccctttgaactacccaaattttttccttttaacttaaaagggggaaaaaaattttttaccaaccccgcaaaaaaaaatttctttttttt

SEQ ID NO: 61272 - DNA, 282 bp, Homo sapiens
acttttttttttttttttttttttttttttttttttttaaaaaaaaaatttttttttttcccccagggtggaaggaaaggggggggtttaaattaaattaaacccccccccttggggttaaaaattttcccccccaacccccccaaaggggggggaataaaggcccccccccccaaacgggggaaatttttttgttttttaaaaaaaaaaggggttttatttttttggccaggggggtttaaaacccctaaccttggaaacccccccctttggcccccaaat

SEQ ID NO: 61273 - DNA, 324 bp, Homo sapiens
tccaccgcggtggcggccgagtacttttttttttttttttttttttaaaaaaggaaatttttttttttcccccaagccaaaagcccggggcctttttggggccaaataaaaatttcccccccggggtaaacccctttttcctgcctaaattccccaaaaagggggaaaaaaaggccccccccccccccccgggttaattttttttttttttaaaaaaaaaaaggtttcccctttttacccaaaggggtttttattccaaaaccttgaaaacccccccccttggcccccaaaagggggggaaaaaaaggggaaaccccccccccc

SEQ ID NO: 61274 - DNA, 261 bp, Homo sapiens
  misc_feature 173: n = A,T,C or G
acgcggggtagaggctcatgattgaaaggcctgaaacagatgtatcttccaagttcttatcaagaaaatgactgtgagggcaacgatgggtcaagaagaccagcggaaaactccctaggagagagccatagaaaatgtacacttcagaagagaaatgtaatcagagaactcanaaaaaaaaaaaaaaaaaaaaaggccccggggggtccccccccccaaggggggtgggggaaaaaaattttttaattttaaggggggggg

SEQ ID NO: 61275 - DNA, 297 bp, Homo sapiens
actgctggtaatgtcagagtgaagcaaatcccacctgaaggcactctcttgcttgaccgtgaagtcacactgagtggttcaccatgtgcctgcactcatgcaaggataagccaggtctctaggcatgggcagaaggatccctgcttcccttctcttccctttcagagcaacactttcagccatttccatgagtctgggctcttgttacccagctgaaatactgtttcctgaaactcacaaatttgctctctaccaaagcccaccttatgccctgcctttccatgaagcctgtcaaga

SEQ ID NO: 61276 - DNA, 259 bp, Homo sapiens
acttttttttttttttttttttttttttaaagggggggggggaaaaaatttttaaagggaattaaatttttataaaaataaaaaaatttcccaaaccctaaaaatttttaaatttaagatttttaaaaccaaaacctttttttccctccattttttccctttttttgtaaacccccccctcccaattttaaaatttcttttttaaatcccaaacccaaaaaaaagggccgtttttttaaaaaatttttttaaaaaaaaa

SEQ ID NO: 61277 - DNA, 572 bp, Homo sapiens
  misc_feature 462: n = A,T,C or G
actttttttttttttttttttttttttttttaaaaaaccaacccccccccggaaattcccccccaaaaggaaaaaaactttttttttgggaagggggggattcaaaaaaaagaacaccctttttccccaaaaaaaggggccttaaaccccaaaaaaagccggggatttttgggggttccaaaaattttggaaaaaaactttccccctttttttttaaaaaaaaaaaggggaaaattccccaaaagcctttttttttttccccccaaaaaaaactttccaagggaaaaattccccccccaaaaaaaagccccctttttttgggcaatgttttatttttttttaaaaattccccaaaaaaacccccctttccttagggggttagggggggggaaaaagaatttaaaaaccccccgggccaactttgggaacccctccctaaaaaaaaaaaaaaaattttaaaancgccccccttggccttgacttttgaaaaaaccccaaaaaaaaaaatttttttttgacccaaagttttttccccccaaaggggtttctttttttgcccccaaaaaattttt

SEQ ID NO: 61278 - DNA, 382 bp, Homo sapiens
acttttttttttttttttttaaaaaagtttatttttttccccgggatataatttaaattatttgaacccccttctctggggttaaaatgaaccctggtcccccaccctcataaaaagagtgggttttaaaatctgccccccccctcctaaataatttttggtttttgaaaaaaaaacattttttttttttgtggccaggtgtactccaaaattcgtccccccctttttatacccccccctttatttctccaagggggctggtttaaaaacggggaccccctttgcaaagcaaaataaggtctttttaaaataaaattttttttttttttctagggcttttttctttaagggaaaccccccccccccaaaggggaaaaatttt

SEQ ID NO: 61279 - DNA, 125 bp, Homo sapiens
aaaggccccccccccctttccaaagtggtttggtggtttttttgggggtttttttttggtttttggtgggtgggttttaaaaaaaaaaaaagttttatttttttccccagggtttttttaaaccc

SEQ ID NO: 61280 - DNA, 329 bp, Homo sapiens
tccaccgcggtggcggcccgagtacttttttttttttttttttttttgggcccccccttcccaaaaattttccttgggaaccccttgcccctttaaaaaacttttaaggggttccccctttttgccaattttccttaaccaaaaaaccaacctttggtcccccccttcaaggccaaaaaaaaaagggggaaaaaaaaaaccccaaaaaaaaaggggggttcccggccccccccctttttaccccttaaaaaaaaaaaaacaaattttttttttggggaaaaccccccccccccaaaaaacaaagccttggttttcttttcccccttggg

SEQ ID NO: 61281 - DNA, 341 bp, Homo sapiens
tccaccgcggtggcggccgacgtacttttttcttttttttttttttttttaaaaaaaaaccccccgctttgtccgggtcttgagaggatgataaaaaaagggggcatgctgttaaacactagggttttttctccccctgacttcatcttatttgtgtaaaatgttgggggtggggtaacccatgcttattgccttcagtatctctgagggactagaggtccaaacatccctcttttaaacctcttattttttgaaaaaatgccttaccaagcgcgttggtgttttttcaaacaatccactacctggtggaataattaggaatctaaaagaggcctgccctc

SEQ ID NO: 61282 - DNA, 156 bp, Homo sapiens
acttttttttttttttttttttgaaaatattttttttttaaaggggaatttggttggaattcccttgtaaggcccaatatttttgggaaaaattgggttgtttttttttttcccaccctcctttttttttttcccttttttaattttgggaatttt

SEQ ID NO: 61283 - DNA, 260 bp, Homo sapiens
acttatcccatgcatacaaaagaaatcttccaaaagcaaatgtgcccataacaattgttactggtaagattactgaggacttttaaaaaaaatttccttatttgcaaactttacagtaaacttttttttttacatattagaactcaatgaagaattatttaaaagagaggaaaggcagtgcagggctggaggtcctggagggtggcggcgggtcgtcctaactagcgggctgaaaggtgctggaggggatgccttcactc

SEQ ID NO: 61284 - DNA, 294 bp, Homo sapiens
acaagctttttttttttttttttttttttttggttaaagttttaaacaaaccttggtttaaaaaatacttttttcccgccttttttaaaggggtttttccttggttttccccttttcctttcccacttgggaaaaattggctttcccttcaagggtttttttgggggttttgccccattttaccccaaggaaaacccccttggggggggaaaacccccccgggaccagtgggcccttaaccttttccccgtgccccccgtaaaaggaaaaaaaaatttttttccttgaaacccg

SEQ ID NO: 61285 - DNA, 300 bp, Homo sapiens
actttttttttttttttttttttttttagggccaaagggttattttcaaattttttaaaagggggggaaaggtttatggaaccccccttttttagggcccaaggaaccccctcccccaaccccccaaaaggggggggttaaaaacctgaaccttttatttttgccaaaaacttttttttcaaaaaccgggaaaaaaatttttggcccaaaaaaaaaaggttcccctttggggggggggggtaaaaaaaaatttccaaaaaatttttccaaatttttttttaaaaaaaaaaggggcccggg

SEQ ID NO: 61286 - DNA, 280 bp, Homo sapiens
actttttttttttttttttaaaaaaggattttctttttttccccaaggccgaattgggaattgaaggggccaattttgggttaattgaaacccccttttccggggttaacccctttttcttgcctaaccctcggaataactgggaataaaaggccccccttaccaccccgggttattttttttttttttaaaaaaaaagggggttcacccgtttaacccagaagggtctaaatccccaaacctggaaatccccccccctgggcctccaaaagggtgggaa

SEQ ID NO: 61287 - DNA, 610 bp, Homo sapiens
aagcgcgttctagtactcactctgaggcctagatggaagctccaccgcggtggcggccgaggtactttttttttttttttttttttggggggggggggggggaaacccaaaccctttttaaatggggggcccttttaagccccccttggggggtaaaattttttccctttttaaaaagggttttcccaaaggcccaaaaaacttttcctttttggaccaaccttaaaatttcccgggggttttaagggggtttggggccaaattaaaaggtaaacaaaaatttttttttggaaaaccctttttcccccggccggggggggttgcccccctcccctaaaaattcccccccttttttcccaaaaaaagggggggccctttttaactttttttaagaacccccctgggtttgggggggttaaactttggttccccctccaaaattttttttttttaattctttttccaaaagggttggggggaacccccttcttttttaacctgggaaaccccgtatcctccccgggggggcctttaaaaaataggggaccccccgggccggaaaaatttaattttaacttttttaaaccccccccccccgggggggggcccc

SEQ ID NO: 61288 - DNA, 612 bp, Homo sapiens
  misc_feature 44: n = A,T,C or G
gggttttcgcataatggtactcagccttgttgtgcctagatggnagctccaccgcggtggcggccgaggtacacctgcaccagcaccaccttccctcttcacattctccatcccatgaatctttgccttaggaaaccaaagcttcctaaaagtagccatgcctgagtctttgtctaggcccctggtatccaattagccagaatgggatgtaggaggcgagattcaaaaacataaactagtttgaaaattgccttcagttttctataatgcttcgcttcatccatgttcccttaaacttctaaagataaataggcctatagtaatacaaaattggattgatttaaaatgatacctgtgatctggtaggatctggaacttactagaacaccaagaatacaaattaattggtatgattttgaatttatagacctgggctgggtttacattcaattttatgtcataagagtgggtttaataacaatatttattgtctaacaacatacaagatctacttaacaaagtatttcaaatatttttcataagttgttgccaaaaccaaaggtttgaattcataagcgaattataaatgattttgatctattctttaaagca

SEQ ID NO: 61289 - DNA, 282 bp, Homo sapiens
acttttttttttttttttttttttttttccccacccccccccccggggggggggggggaaatttccccccccccccccttttttgggggggggacccctttttaaagccccctttccgaaaaaaaaccctttttcccccccccccgggggccccatgggggggccgggaaccccccttaaaagtttttgggggcaacctttaaagggggtcccccccccccggggggggcgtcaaattcccccgggttttttaaaaaaaaaaaaagccgggggccccccccc

SEQ ID NO: 61290 - DNA, 282 bp, Homo sapiens
acttttttttttttttttttttacttgtgccaaaaccacagctttaaaaaggccttttcacaccaaatggaaaactccgtcggaacccccgggtttttcaaaatttgacctcaggggggaaattctaacaaagaacctttttaaaacttgtacacgggggccccttttttaaagtggaattagaacggccctttcccttttcttgcataagggagggaaaacccctttggggaccccccccccaccctttcaaaggatttttttcttcaccccctttttttt

SEQ ID NO: 61291 - DNA, 293 bp, Homo sapiens
actttttttttttttttttttttttttccaaacccccaaaaattttttacccttttttccccccccttttttttttgggggtttgaaaaattttttttgggggggcccttttcccccccttaaaccctttgggaccttccccttgggggcaccttaaaattttttttggggggggggttttaaaaaaaaattttgggccctttttttttttttgggccaaaaaccaatccccaaattgggggaaccccccccctttcgggtgagaaaaaatggtttttttcggggggcccccc

SEQ ID NO: 61292 - DNA, 295 bp, Homo sapiens
acaaagagaggaattttacagctgggcctccaggggtaacatcacatattggtaggtctgtgatgtcccctgagccacaaagccagcaagtttttattagggattttaaaaagggaggggtttttattagggattttaaaaggggtatacgaacagggagtaggtcacaaagatcacatgcttcaaagggcaataaagatcacaaggcaaaggcaagattagaattactgatgagggtctatgtccctctctgcacatattgtcatgacaaacatcttaacagaaaacagggtta

SEQ ID NO: 61293 - DNA, 167 bp, Homo sapiens
actttttttttttttttttttttttcccccaattgggttggcaatcgggggttttttttaccctttcccccccttttattttggccttccccattttttggaaccccaaaaaaccttggggtttggggccctttaaccaccacacccccaattcccggattttgctt

SEQ ID NO: 61294 - DNA, 300 bp, Homo sapiens
actttgtttttttttttttttttcccccccgggaaaaacgttttttttcccccccggttgttttaaaaaacctttttttttttctttcccgggcgccttttttaaagattctaatttttttttaaaaattttagccgttcaaaaccccgggaaaagattacccccaacaggttttttaacaccctgtggcctttttttttaaaggggggggttaaaccccttttttaaaaaaaaaaaaaaatttttggggggttttctaagaccccccccgcccccctaaaaaaacccccgggggggggg

SEQ ID NO: 61295 - DNA, 296 bp, Homo sapiens
actttttttttttttttttttttttttccccaaaaaaagcccccccccctttttgggaaaagggccaaaaaaaaattttggggcccccttgggggaaaggggggggttaattccccccttttttcccccccggggggggggggcaaataaaaaaaagggggggggggccttggggaaaaattttttgggaaaaaaaacccccgggggaattgggagaaacagcccccccccaagggggacccccaattttttttttcccaaaattttggggggggggggaaggggcaaaaaaaaaa

SEQ ID NO: 61296 - DNA, 431 bp, Homo sapiens
actttttttttttttttttttttttcccctttttttcccgggtttttaaaacccccgggttttttcaaaaacccctttgaaaaaaccttgaaaaattggggaacttttttgggggcaaaaccccaaaattaaaaaaaaaccctttttttcccccgggccccaatcccccttttttttgggaaaaaaaccccggggggcccctccctttttttttgggaacccccccttttggggaaaaaaaccccccctcccccaaaattttttggggggccgttaaaaaccccccccggggggccttttaaaaattaggggaccccccggcccgggaaaattcaatttaaacttttttaaccccccccccccgggggggggcccccgccccccctttttttcccctttaaggggggtaaatccccccccggggaaaaaaa

SEQ ID NO: 61297 - DNA, 296 bp, Homo sapiens
acttttttttttttttttttttgggacccctgaccctttttttttttaaaccccttgggggtaaaaaaccccccccctacttttggccccaaaatatttttaaaaggggcctaagaaaagggtttttggccccaccaaataaaagccttttttccagggggggagggcccttcttcaaaaccttttttttaaaaaaaaaaaaaaaaggggaattcccgggccccctttttttgcttgaaaaagggtaaaaaaccttaaaaatcttttttttttttccaaaaaaaaaaggggccttt

SEQ ID NO: 61298 - DNA, 401 bp, Homo sapiens
actttttttttttttttttttttccaaaaaagggatttttttttttcccccagggtaaaaggaaaggggccaaatttgggcccatgaaaacccccccccccgggttaaacccttttttttgcccaaaccctctaaaaaggggggaataaaggccccttaaaccccccccgggaaaaattttggtttttttttaaaaaaaaaaggggtttaacccttttaaccaaaaaaaatttaattccccaaacgtggaaacccccccccttggccccccaaaagggggggaataaagggggaaacccccccccccggcccgggggggcctttttcttttattttaaaattttttgggaccccggttccttcccgggggggccgtttaaaaaatagggaacccccggggt

SEQ ID NO: 61299 - DNA, 154 bp, Homo sapiens
actatccaagtatttgatttttgtgactaaggagtttcggctggcccaccgaatttccatggccacctttcccactgaccccataacaggaataaaaatggccacaaggatttggccaactgacccatctgggcatggagcatcattatgaact

SEQ ID NO: 61300 - DNA, 285 bp, Homo sapiens
acgcgggttctggagctgttggggcttaggaagagtgtgtttactctttgctcaacagtttgttctagtgaaggacttgaagcaggagagtaacaagctcatgttttttttcctatacttgtaaaaattattcagctttccactctttaaatatactaaaatgggcacctaaatgttgtacgataagaattggtttcttttctctaacagcagaaaggcttgggatactgaaggaaatgtgacttttctgcctttgtctattgggtaagtggctcatgcctatag

SEQ ID NO: 61301 - DNA, 285 bp, Homo sapiens
actttttttttttttttttttggggggaaaccccggaaacaaatttaacccttttaccccccaacccttcttaaatttttaaaaccaaagggaagggattttttttttttcttttgaacggaactttcccctaaaaaccaaaaaaaggggggcacccttttgaaacctttttttttttttattaaccggggtttttaaccggggacaaaacccccccttaaaattttttccttgggaagggggggccggcaaaaaaaggaaaaaccttttttatttaaaaattcc

SEQ ID NO: 61302 - DNA, 164 bp, Homo sapiens
actttttttttttttttttttttttggaaaaaaaaaattttctttttttcccaggtaaaaatttttgggccaaattttggtttattgaaaccccaaacccctttataaaagggatttccccccctttccccccggaaaacggggaaataaaagcctcccccccc

SEQ ID NO: 61303 - DNA, 315 bp, Homo sapiens
  misc_feature 16: n = A,T,C or G
tccaccgcggtggcgngcccgaggtactttttttttttttttttttttttttttcctttttttttttttttttttttttttttttttttttttttttttgcccccccccaacccaaaaattttttttggcccgggggggaaaaaaaccgggccccccccttgggggggggggggggaaaggcccccccaatttttttcccaaaaaaagggggggcccccaaaaaaaccccccccccccggggtcccccccctttgggggcgttttccaggggggccaaacatttttttttttcccccccctttccccccgggggg

SEQ ID NO: 61304 - DNA, 463 bp, Homo sapiens
acgcgggattgtagttattttcaaatctttgcttgataagtattaagaaatattggacttgctgccgtaatttaaagctctgttgattttgtttccgtttggatttttgggggaggggagcactgtgtttatgctggaatatgaagtctgagaccttccggtgctgggaacacacaagagttgttgaaagttgacaagcagactgcgcatgtctctgatgctttgtatcattcttgagcaatcgctcggtccgtggacaataaacagtattatcaaagagaaaaaaaaaaaaaaaaaaaaaaaaaaaagtttccttcccgggggggccttttaaaaattggggaccccccggggtgggggaatttttttttaacttttttaaaccccccccccctgggggggggcccggcccccccttttttttccttttaaggggggttaattgcccccttggggaaaaaag

SEQ ID NO: 61305 - DNA, 274 bp, Homo sapiens
tccaccgcggtggccgagcggccgcccgggcaggtactttttttttttttttttttttttttaccaaaaggggttttaaagggtttaaccccttccctggtcccctttttggcccggtttccttttttttaaaaaatttaaaaatgggccccttttttttggggggcgggggggggggtcccatttttgaaaaatttttaaacccggggaccccagggggggggttttttagggggtttggggggttttttttaagggggggtttttaattgcc

SEQ ID NO: 61306 - DNA, 349 bp, Homo sapiens
actttttttttttttttttttttttgccaaacccccctggggtttgggtttaaacccctttcctttcccccccccaaaacctttttttttttcccccctttttaaccctggggggccccaaaaaaaaaattttttgtttttcccaattgggcccccccccccccggggaaaaaaccaaaattttttttttttttttttggcccccatttgggggccggggggggtattttttctttttttaaaaatttttttttttttgaaaaaaatttttcccttttttttcaaaaaaaaaaaaccaagtttaaaaaagccccccagcccctcggttttaagtaaaattttttttttt

SEQ ID NO: 61307 - DNA, 624 bp, Homo sapiens
  misc_feature 228, 525, 526, 527, 528, 536, 537, 538, 539, 540, 541, 542,543, 544, 545, 546, 547, 548, 549, 550, 551, 552, 553, 554,555, 556, 557, 558, 559, 560, 561, 562, 563, 564, 565, 566,567, 568, 569, 570, 571, 572, 573, 574, 575, 576, 577: n = A,T,C or G
  misc_feature 578, 579, 580, 581, 582, 583, 584, 585, 586, 587, 588, 589,590, 591, 592, 593, 594, 595, 596, 597, 598, 599, 600, 601,602, 603, 604, 605, 606, 607, 608, 609, 610, 611, 612, 613,614, 615, 616, 617, 622: n = A,T,C or G
cgcgcgttctactactcacttataggctagatgggactccaccgccggtggcggcgcgaggatacaatgcgcagccatcctgttagctcactagcaactgtctcgcctgcacggattcccatagcgatctgtcactccgctcagcctccccaggtgagcctgggactactaccacacctggtgactacagccagctgccaccatgcctagctaattttttggattttnagtactgacagcgtttcactgtattggccaggatggtcttgatctcttcaccttgtgatccccttgccttggcctccaaatttgctgggattacagtcctgagccaagatccaaaaaaaaaaaaaaaaaaaaagttccctccccggggggccctttaaaaaataggggaccccccgggccggggaaatttaatttaaacctttttaaacccccccccccggggggggggcccggccccccctttttttcccctttaaggggggttaattcccccccggggaaaaaaagggaaagttnnnnccccgggnnnnnnnnnnnnnnnnnnnnnnnnnnnnnnnnnnnnnnnnnnnnnnnnnnnnnnnnnnnnnnnnnnnnnnnnnnnnnnnnnnaaaanaa

SEQ ID NO: 61308 - DNA, 297 bp, Homo sapiens
acgcgggatggaatattattggggatgatgtctttaataatacatctcaagataggagaaactttttctatatagttgactttaataaaagcctagggcaaaactttcaatatatttaacagtatttatgaggcagttaagaatttgggtcatctctgtctccactaaaaatacaaaaagttagccaggtgtggtggcgggtgcctgtagtccctgctacttgggaggctgaggcaggagaatggtgtgaacccgggaggtggaggttgcagtgagccgagatcatgccactgcact

SEQ ID NO: 61309 - DNA, 412 bp, Homo sapiens
acttttttttttttttttttttttttgggaaaaaaagggtttgtccaacttgccggggtttttaaaaatcccggggtccaaaaaattccccccctttggcccccaaaagggggggaattaaaggaaaaacccctttgcccccccctaaactttttaaccccccaaaaattttgaggggcccccccccgaaaaaaaatccccacttttttttttccccaaaaaaatcccatttaaaccccccttttcaaatttctaaaattaaaaaaaatttaggtttccccaatttccaaaatgggcccaacccaaaaaaatttttaaatttttttcaaaagggggaaaattttaacccggaaaaaccttttaacctcccccttttaccccaaaaatttttttttaaattcctccccggggg

SEQ ID NO: 61310 - DNA, 204 bp, Homo sapiens
actttttttttttttttttttttttgaaaaattttttttttaaagggggaatttttttaaatttcccttttaagccccattttttttggaaaaaattgggtttttttttttttccccccccttttttttttttttccctttttaaatttgggaattttgttacataaggggaaatattttccccctttttaaaatacaattttt

SEQ ID NO: 61311 - DNA, 200 bp, Homo sapiens
tccaccgcggtggcggccgaggactttttttttttttttttttttttttttccccccaaaaagaggttttttggttcttttggggaggggccccccccccccccttttaaaaaaatttcttttaaaagaaatttggggttcccccaatttgggggaacatttttttccccgggggggtaaaacccccgggggggggcttt

SEQ ID NO: 61312 - DNA, 292 bp, Homo sapiens
actttttttttttttttttttttttttttttcccccccaaaaaatggggaaaaggcgttattgggggggaaaaaaatccccctttggaaaaaaaaaaggttaaggggggtcttgggctttttatggggggaaataaaaactttttttttttttaaaatttttccaaaaagccccctttgggaaaaaaacccttttaggggggcccccccttttaaaaaaaaaagggggaaaaaaaaaaaggggttaaacttttttccttttttcggggccaaaaaaaaaaaggggcctgggg

SEQ ID NO: 61313 - DNA, 546 bp, Homo sapiens
  misc_feature 530: n = A,T,C or G
acatattacatatagctttgtcaactagagtctagaaacaataagcaacctggtatcattgaaactacctggcactcagactgtgttccttaaataacatttcctctaaaaacaatgatcattggagaaatggcttattccaagtctgggtcagaaagtataatagataagcctggggcaattatactatatgagaaaacaagaatgccatcaaaactactggatcatgtcagaaggactcaggggcccctgaggcttacactggccaaagatgggacaatctgagcaacaataagaataataacctcaatgattgaagcagatgaatacatcaaacatacttaaattaatatcttcttttgagacaaaagtttcattgattatcattggaagataagtcattttgaaaattgataaataagggaaaacaatcaagaatttattctgcttttccaggggtaaccatgtcaggtaactaaatagttgataagatgacatttctttctctttatgtaagtatcccagttaantaattaagaaggaaag

SEQ ID NO: 61314 - DNA, 593 bp, Homo sapiens
acttttttttttttttttttttttttttttttttggggaaaaattccccttttgccccccggggggggggggggggggttttttcggctcaaaaaaaaaaaaattccggttttaaaaaccggcccaaaaaaaagggggggggcccaattcccccccccccccctttaaaaaaaggggcctggggggggggtaattttttttccccccggccctggggaaaatttttccattttttccggggggttttttgttttcccaaaaaccaaaagttttccaaagggcccctttttcccggccaaagtttttaaattttccccccaaaaaaaaaatttgttttgggggggggattttttttgggaaaaaaaaatttgggttccccttttttaaccccaaagggggccccccccttttttcccccctttttttcccccgggtttttttttaaaaaaaaaaatccccccggggggggggtttttaaaattgggggccccccgggggggggggttttttttttaacttttttttcccccgcccccccggggggggggcccgcccccccccttttgcccctttttgggggggtaattcccccc

SEQ ID NO: 61315 - DNA, 143 bp, Homo sapiens
actttttttttttttttttttttaaaccccccccttttggggttacccgggggggaaaaaaaaccttggggggtaattgaaaatttggggctttaaattggcaatccagggtttaaattcccccccggttttttcgggaaaaa

SEQ ID NO: 61316 - DNA, 355 bp, Homo sapiens
ggacccgcgtactcgtacatacttgaggcctgataggactccaccgcggtggcggccgcccgggcaggtactttttttttttttttttttttttttgggccgggggggggggggtttttttttttttttccttttttttcccttttttttttttttgtttttttttctttggggtaaaaaatcccctttttgggacctttaaaaaaaaaaaaattattttttttttggggccccttttttttttaaaaaaaaacttttaaacccaaaaattcccttttaaaaaccgcctaaaattttccccaaaaaatttgaaacccgggggaaatttttcttcccccaaaaaaaatttccccct

SEQ ID NO: 61317 - DNA, 364 bp, Homo sapiens
tccaccgcggtggcggccgagtacttttttttttttttttttgaaaaaaacactaaaaaggtttttggtccaaaaaaaaaaaattcaaagggaaaaagggttttatttttttttttggccggggggtccattttttaacctaaattttatcccccaaatatttccctttgcttttgtttaaaaaaacaaaaaccttaatttcccctcctttacctgggaaaaacccttttttttttgggggttttttttaaaaacacccctaacctttaattttggcccaaaaaccccaacaaaccattttttttttggaattttcccttcccaacctttaaaaaacccccataattttttttttgcccccccc

SEQ ID NO: 61318 - DNA, 410 bp, Homo sapiens
acagtgaggtaaacaaaaatctattcttagatatccttagatttggttaactgaggctgtagaagcagcgaattgtctagccatttaagttatttttgtaaaattcagcataaacatcaatctctaatttctatctagaagtgactttaagacattacaagaacattgccaatttggaaaatgccaataaaatactgtagacttattaatattgtagacttattatcagccttttactatagcttaatttaattatggttttcatttttactgtaagaggccaagacttcacttatgtctcctgtggagctgaggctcctggcccttgttattataacaaactctggctccttgtaatgatgcttactaactcaaagccttctccagcattcagggttagcctttcattg

SEQ ID NO: 61319 - DNA, 477 bp, Homo sapiens
acttttttttttttttttttttgatttgcaaattggtttattaaaaaaaaaccccccgggataccatttttttggttaacccccggtttggggggggagaaaaccaaaaaagggcggaaattcgggggatttcccatttggggggggttaaaaagggcccccccccggcccttaagagggggggggggttcttttttcatggccaaagaattttttttgggttgggggggggggttttaaaaagggaaattcccccctggggggaagggttcccgggaaaaggggccccccccccgggggggcccccccttgccgggttttttggaaaaaccccggcccttttttttggaaaaccgtttgtttttaaaaaaaaaggggggaagccccttttcaacccccaccaatttactttttgaagaatccttttttaccaaaggaatttttccccccaagttgctaaacttggacccaaaaaat

SEQ ID NO: 61320 - DNA, 306 bp, Homo sapiens
acttttttttttttttttttttttgggggaaggaatttttttttttcccccagggtggaagggaagggccaaaatttggttaaatgaaaaccccccccccggggttaaagccttttttctgcctaaacccccaaaaaagggggaaaaaaagggcccccaaaaaaccccggggtaatttttttttttttaaaaaaaaaaggggtttcaccggtttaacaaaaaagggttaaaatccccaaccctgaaaaccccccctttgggcccccaaaaggggttggattaaagggaaaaacccccccccccggg

SEQ ID NO: 61321 - DNA, 151 bp, Homo sapiens
tccaccgcggtggcgtgaatgaagcctcctatgatggcaaatacagctcctattgataggacatagtggaagtgagctacaacgtagtacctcggccgaggtaccgcaagggaaagatgaaaaattataaccaagcataatatagcaagga

SEQ ID NO: 61322 - DNA, 283 bp, Homo sapiens
acttttttttttttttttttttttttttttcttttttttttttttttttttttttttttttttttttttttttttttttttttttttttaaaaaaaaaaaaaaccttttggggggggccccccccccccaaaaaaaaatttccccccccaaaaaaaaagggggtttttaaaaaaaaccccccccccaaaaagggggaaaaaaccccccccccccgggggggggagaaaaaacccccccccccccggggggaaaaaaaccaccacccccccccccccccctttt

SEQ ID NO: 61323 - DNA, 396 bp, Homo sapiens
accttacatgtatgctagagtagaatgattaagtaaatgggtggctgatggtaggagacagatttctcactattggagcaggagtttttagataagcaagggcaggaagttagaatcatccatgtagtgattcaactggaaccgaatacatcaatataaactcatgtttagcttaattagatacagatggatacatatagaaatatttatagatatgtggatatatacagggtagtataaatacatacattttctggctctgtcagctgagatggcctacaagcaacaacaccccagtagcaacatgtgcacctagcacctagatcttggtttctccattctccagtaaaaggaaccaaggctccatggagaaatggctaattctaggattgagac

SEQ ID NO: 61324 - DNA, 258 bp, Homo sapiens
acttttttttttttttttttttttttaaaaagagggggggttttatttttcccccaaggggggaccccagggggaaaaaaaaatttttttgaaccctaaaattttggggctaagaaaattttttaccctaaccccccaaaaaaggggaaaaaaaaggcttggcccccaattcggggaaaatttttttttttttttttgggggggaaaaaaatttcatttttttttcaagggggggaaaaaaaccggggaaaaaaaaaa

SEQ ID NO: 61325 - DNA, 278 bp, Homo sapiens
actttttttttttttttttttttttttaggggggggaaaaaaatttttaaaaaacatttttaatggcccctttccttttttttgggggaaaattttttttaaaatattgcaaaaaggggccccgggtttttttttcccctaaaaaccggccaaaaaagccccagttttaaaccctttttttgccccccccccccccggggccttttttccccttgggtcaaagcctttcctcggggggggaacccccccaattttaaaaaaaacccctggcttttttt

SEQ ID NO: 61326 - DNA, 224 bp, Homo sapiens
actttttttttttttttttttttttcccggggaaaaaaaaaattttttgttttttaaattccttttttttccctttaaaattttccccacccccccaaattacttcgggggtttttggggccctttaaaacaaaaaaaccggctttttcaacttgggggttttaaaacccccccctttttttgccccgggcccccaaaccatttttcctttgcccttgcaaaaa

SEQ ID NO: 61327 - DNA, 469 bp, Homo sapiens
acttaggagatacatgccaaagaaagtgggatattcgcctatagaaccacagtgatcacattagagaaattccactgccacaataatatctaatatggtgcatatttatatctccacatttgtctcagcgtccttcattttcaactcagggcagaatcctgttactccctgcatttagttgtcaagtctctttagtctcctttgatctataaccgttcctttgcccatatccccttttttttcccttccatggccagttgttttatagaatatcctacagtttggacttgtttgatttctcatgaatggattcaggttacatttaaacattttggtaagaataagacataggtgacattttgattaccttttaagagtaaaacaattcacatgtcaaactatttggatactgtctcagtccatttgtgtgggtataaaagattacccgacgccgagtcatttatcaaaa

SEQ ID NO: 61328 - DNA, 248 bp, Homo sapiens
acttttttttttttttttttttttttggggaagggcccaaacttgttaaaaaaaaaggggaaaaccccccaaaccttattttaaaatttgaattaaggggctttttttttttagggggggaaaaccgaaaaaaaaaaaaaatcccgccaaaaattttatccttaaagggaaaagggctaaaaatggggggggccctttttttgcttaggggaatcaggggggaaaaacaaattgggcttaattcccct

SEQ ID NO: 61329 - DNA, 536 bp, Homo sapiens
ctccccgcggtggcggccgaggtactttttttttttttttttttttttttttttcccaaaaaaatttttttttttttaaaaaaccccccccccccaaaaaaaagggttttttcccagggggaaaaaccattcccccccccttgggggggcccgggccaaaaaaaaaaggggccccccttttttggggcccctttttttgggggggggggcaaacccttttttttttttcccccatttttaacccgtttttttgccccttggaaaaacttccccgggtttccccaggggtttcccttttttggaaaaaaatttgggggtcctcccccccccggggccaaacccttttttttttggttttttgggggagggggggaaggggcccccccccccttttttttaaaagggccccccggcccatttttttttttttttccctttaaaaaaaaattttttttttttttttttttgggcccttttggccctaaaaaaaacctttttttttttttggggcccaaaaaaaaaaaagggcccttttt

SEQ ID NO: 61330 - DNA, 191 bp, Homo sapiens
actttttttttttttttttttttttttaaaaccacccccctttttttttggtaaaccccctaattgggcaaggccccccctttcccgttgggcccccgggttgggggtttttttgggtaaaaaatttgcgccgggttcgaaaaaaaccctgagggtttttggggccctaaatttgggaaaaaacctttaaa

SEQ ID NO: 61331 - DNA, 255 bp, Homo sapiens
acttttttttttttttttttttttcccaaaaaaaagaaaacccccaggggttaaatttaaaaagggggacccccaaaaccccccccaatcccactttttttgtttttgttttaaaaaaaaaaattccctttttttttggtccccaaaaaaaaaaccctttttaaatttttccccttttaaaaaaaaaaaaaaaagggccttctttgaaaattttttaaattccaacccacaattcctattaattttggggaaaaa

SEQ ID NO: 61332 - DNA, 411 bp, Homo sapiens
  misc_feature 6, 344, 348, 357: n = A,T,C or G
acgttngaaaaagttcagatatttttaaatactttgtgattttttggtgatgggattattggaaacatttttccttattttaaaaaaatgacccaccaaacattataaaatagattattttcttttattaaaattgataagtttcaggagtgaattctttatgccaatacatagtcattgttgaaaaaatagttatatggggtggggggagggggggagggatagcattgggagatatacctaatgctagatgacgagttagtgggtgcagcgcaccagcatggcacatgtatacatatgtaactaacctgcacaatgtgcacatgtaccttgccccgggcggngacnacccattcnaacgtctgccctatcaactttcgatggtagtcgccgtgcctaccatggtgacca

SEQ ID NO: 61333 - DNA, 612 bp, Homo sapiens
gggattcgcgtactagaacatactctgtgtgcctgaatggaagctccaccgcggtggcggccgaggtacttttttttttttttttttttgggggggggaaaaaaaaaccttaaaataattgcataaatttttttttggcgcaaaaaaagttttcccaaaatttttttccccaaaaaaaaaaaatttttttttttccctttttttggggggcaaaaaccctaaaatttttttcccaaaagggtttgggttaaaagtttccctaagggcccccccaaatttggggggggggccccccccctttaaagggttaggggggggaagatttttttaaatcccccctttggggtgggggggggccccggtttttccccccggggccctcccaaagggggccctaaaaactaaacccccccccccttaaaaggggggaaaaaaaaaaggggaaaccccaggcccccccaaaaaaaaaaacccctttttttttaaccctatttgagaagggacccccccttttttggccccttcctttttttaaaaaaaaaatccttagccccccccccccttaaggggggggggttaaatttctcctcttaaaagaaggctttttttttt

SEQ ID NO: 61334 - DNA, 328 bp, Homo sapiens
acgcgggtgagttttcccacaacagtaaacagcctgagagcatttgtgtcctcaagattcattatgtcgttctactagagggccttaatctttttcaacaagctggcgagagttataggagactgccagaagaatcggtgttcagaggtgcaagaggttggtgacatggtggtttggggtttatttttttttctatatggtcatttatcaatgtatataatgatactgaaactagaatataattccaaggattacttggttaggagtggttaatatttgtgtggccttgggcaagttacttaatgcctctttgccttgaattccccat

SEQ ID NO: 61335 - DNA, 351 bp, Homo sapiens
  misc_feature 32: n = A,T,C or G
agcgcgtactggtacttactttgaggctattnggactccaccgcggtggcggccgcccgggcaggtgcatagttcttcatatatgtcatagtttactatcataaacttatgcttacatatagttgggcaaggagaaggggaacattttattagccaggggtccccagagaaacagaaccaagaggatatacataaagagaggtatacatgagaagggacttatgaggggaactggctctctcaattatggaggctgaggaggcccacaacaggttatttgcaagttggagaaccagagaagttggtagcatggctcagtccaaaggccaaccaaggaagctgatggtataa

SEQ ID NO: 61336 - DNA, 431 bp, Homo sapiens
acttttttttttttttttttttttttaaaagagagaggatttttttttggttccccccggggggggggcaagggccaaatccgggccccggggcaaatttttgttttttaaaaaaaaacccggttccccctttgggccccccggggtttaaaacccccccccctagggaaccccccgccccaaccccccaaaagggggggaattaaggggtaaaccccccggccggggccttttaaaatttttttaaaccctattttttcccccccccctttaaaagccccaattttttttcctttttttccccgaaaataccccctaaaaaaaaaaaattcctttttttcccaaggaaaaaatttgtttttaacccatttccccggggggaaaaactttcccccttgggaaaccccccacctttcccggggggggggggg

SEQ ID NO: 61337 - DNA, 452 bp, Homo sapiens
tccaccgcggtggggcggccgaggtacttttttttttttttttttttttttttttttttttttttggggggcccccccctctttttaatgggtttttttttaaaaaaaaacctttttttaaaaaggggttttaaaaccggggtttaaaaaaaaccctttttttttttaaaaaaaagtttaccggggggggccctttttgggggggggggggggggttttttttagggggggaagggttttaaaaacccccgggggaaggggggattttttccccccaagggggggcccccaggggggtttccccccaaaaatttttttggggggttcccccccggaaaaaaaaggcccccttttgggggggggggaatttttttttttaaaaaaagggggattttttcggggggcccctgggttttttaagggggggggaaagcccaaaaaaaaaccccccc

SEQ ID NO: 61338 - DNA, 411 bp, Homo sapiens
caccgcggtggcggccgagtactttttttatatatatatatttttttttttaatttgggaggaaaaaacaccccccgggggtttggggtttttttttggtttggttttgctttttttttggggggggggttttgttttaaatcccccaaaaaaatttaatcttttaaaacccccgggggaaaaaaaaaaaaaaactttgggggggggggcaaaaaaaagggtttaaaaaaacaaaaattgacccggggccctttgggggattccccaaaattaaaggggtccacccccctttaaaaacaaaaaggggccccccggggggaacaaaattttaagggccccgggggggggttaaatggggggggaaaaaaaaaaaaagggggaaaaaaaaaaaaaaacacccccccaaaaaaa

SEQ ID NO: 61339 - DNA, 292 bp, Homo sapiens
actttttttttttttttttttttttttaatggggaaaaaaaaatccttttttgtaccccctaaagccccaaatttggggttgggaaaaaattaaaaaaaggggaaaactatttttttgggggcggtttttttttttgggggcctaaggggggggaaaaaagggggcctttttttaaaaaaaaaaaaaaaagggtattccccctaaaaaaaattttttgaaaaaaggggcccggggggggaaaccccccttccctggcccttttaaaaaaaagggaaccccccggcctgaaaa

SEQ ID NO: 61340 - DNA, 307 bp, Homo sapiens
actttttttttttttttttttttttccccccaaggagggaaaattgccccctggggaaaaaaaattaaaggggggggggtttgggaaaccctttattggggggaacccctttttttttttaaaaaaaaggggcccggtttttttccgaaaaacccttttgcccccgggcccttttttaaatttgcccccttattaaaaaattcccccggtaaaccctttttttgggggtttttttttgaaaaaaaaaccccccggggaaaaacttttttttattaaaaattgggttaaaaactctcgaaaaaaaaaa

SEQ ID NO: 61341 - DNA, 284 bp, Homo sapiens
actttttttttttttttttttttggctttttaaaaaaaaaggggtttcaccatttggggaggggttgttcaaaacccccaccccaagggaattcccccccccggcccctaaaaaggggggggattaaagggaaaacccccccccccgggccttttttttttttaaaaaaaaaaaaaaaatttttttttttttcccaaaaaaaaaattgattttttaaagggggaataaacttccccaaaaaccctggggtggaaaatttaaagggccgctttttatttcccccc

SEQ ID NO: 61342 - DNA, 182 bp, Homo sapiens
acttttttctttttttttttttttttggaaaaaacgggttttaaaattgtgcccaatttgggtttaaaactcggggcttaaacaattcctccccttggccctccaaggggttgaattaaagggggaaacccaccgccctgggcctaacttttttaaaccttttttctaagaaaaaccttaaa

SEQ ID NO: 61343 - DNA, 595 bp, Homo sapiens
  misc_feature 39: n = A,T,C or G
taccgcgtactggtactcactctgttgtgcctaattggnagctccaccgcggtggcggccgaggtactttttttttttttttttttttttttggggcgcccctttccaaaaattttcctttgggaacccttgacccttttaaaaaattttaaaggggtgcccccttttggccaatttccctaacccaaaaaccaaaccttgggtccttttttccagggccaaaaaaaaaaggggaaaaaaaaaaaccctaaaaaaaaaggggatttcctggcccccccctttttacccctttaaaaaaaatgaaccaattttttttttgggggaaacccccccccgccaaaaaaccaaggcctgggtttcttttaccccttaggggctttaggaaatttaaaaaaacccccaaggggccccaaattttggggccttatggaaaaaccccccttttcccaggggggggttaccctaaggggtttgggttttcccggggggccttgtttcttttggggaaaaacctttcaggcctggggccattttaaaaccaaattttttggggggggtttttttaaccccgcttttttaaaaacaaaaaccttcg

SEQ ID NO: 61344 - DNA, 594 bp, Homo sapiens
  misc_feature 442: n = A,T,C or G
acaattttacataaacctaataaacattaaggcatttggggcaacagcatattattttccaaacaaaacttaccaaaggggataatgctcatcttcacttttgccaaacacaacctctcggagatgttcatatgtgaccattcgacctccagaatacactgggtaaaaaaaatcattaaaaaggtaactttggctatatgtatctatatgcttatgtatgtataaaataagaggacattccgacatggcctagtcaatctctctagctgtgtctttgtctcatggggccggtgcttctaacacgtgggcttcttgatgcttctccaaatggggcatgctcttttcagactctgcccttcccacacactgtctgatctttctagaatgaattctcccttctctgctttactaacatctccttgtctttcaggactcaactcanaaacatgtttttcagaaactgctctctgacctttttatcatattgattagaaattaactcttcttgcttatctttccatcagaccatgagcttctccaggcaggctctatgtgtttgttttttacttaccccagatgccctagtacctgccc

SEQ ID NO: 61345 - DNA, 351 bp, Homo sapiens
cgcggtggcggccgaggtacttttttttttttttttttttttttttttgccccctggggaagggggggggggggaattttttttaaaaatttttaagggggggaaaaaaaaaaaaggaaagggattggggggaaatttgggggcccccccccggttttttttggggggccctccccccgaaaaaaggggggggccccccaaccccttccccaaaaagggaaaccccaatttcccctccccggggcccctaaaggggggaaggggggcccctaagggaaaacccccccccctttcaaaaattctctgggggaattaattctcgccccagggcccaaaaccggggggtccccc

SEQ ID NO: 61346 - DNA, 122 bp, Homo sapiens
acttttttttttttttttttttgggggaggggggggtaaccctaaacccctttttaattggggggcttttttaggcccacctgggggggaaaaattttaacccctcccaaagggtttttcct

SEQ ID NO: 61347 - DNA, 269 bp, Homo sapiens
actttttttttttttttttttttttgccccttactttttggttcccaacggggttttttttttttggttcccttttttggggggaaaaatttttttttttttttaaaaaagggggtttttttttttaaatcccccttttttttttttttttttttccccccccccgtcttttggtttcccattttccccttaaaaattttttttttccaaaaaggggttccccccccccccccaaaaaatttttccctttttcgggggggttaaaaaaa

SEQ ID NO: 61348 - DNA, 130 bp, Homo sapiens
acttttttttttttttttttttaaaccccccccggggggggttacccgggggggaaaaaaaaccttggggggtaaatgaaaaattggggcctaaaattgccaatcaaggttttaaattcacccccggctt

SEQ ID NO: 61349 - DNA, 408 bp, Homo sapiens
acttttttttttttttttttttttttttaaaaaaagggttttttttttttccccgggttaaactaaaccccgggggcaaaaaaaatcccccgcccccttttccccaaggggtgaaaattttggggtttccccccccccccccctttttaaaagtttttttttttttcccaaccccaaaaaaaaaccaaattttttttggttccccctttttacttttggaaaaggctttttaaaaccttcggaaaattccccctttttttttgtccccccgccccataaaaatttttttggaaaaaaaaatttcttttcttaaaaaaaacccctttttccctttttttcacaagggttgtttaaaaaaaaggagccctccctttttttttaaaaaaaattgcccctggcccctttaaa

SEQ ID NO: 61350 - DNA, 306 bp, Homo sapiens
actccagcctgggcgacagagcgagactccatctcaaaaaaaaaaaaaaaatagtgggtcttagggccccccccctttagcccaaactttgggaaacctaaggcaaagggatcttttgcccccaaaatttcggggttccggggacccttaattttccccttgtttcccaactggggggcaaaccaaaactcccacctccaaaaaaaaaaaagggttttgggtttaaaaaccctggaaagggatgaaattttgaagaaaaaaaaatacccctgccctttttggccaggggccaccaccttggaaaaa

SEQ ID NO: 61351 - DNA, 279 bp, Homo sapiens
acttttttttttggtttttttttttttttaggggccttcggtgggggggccggggggccttggggaaaccccaaaaaaatttttttttttttgaaaggtaaaaattaaaccccccccctaaaaaattttacccaaggggtcccaaaaattttcttaaccgtaaatttttaaccgaattttaaaaccctaaaattttaaaaaaaaattttaaacctttaaaaaattccctgggggaggaaaaaaaaaaagggttttaaaacctggccgggggtggaaaaa

SEQ ID NO: 61352 - DNA, 139 bp, Homo sapiens
  misc_feature 65, 74, 75, 85, 86, 112, 113: n = A,T,C or G
acgcggggggggaagccatctgccttcgagcctgccactgaaatgcaaaagtctgtcccaaatanaagccttgnngaattgaaannaatgaacaaacattgagaagcagatnngagatacttcccaccagaaatcccaa

SEQ ID NO: 61353 - DNA, 299 bp, Homo sapiens
actttttttttttttttttttttttggggaaaaaaaaaggtttttcctttttccccaggggggttttaaacttcggggttaaaaaaaacttccccccctttcctccaaaagggggggaaaaaagggggggaacccaaaccccgggcccatttttttttctttattaaaaaacttgggggggtttaaaataaaaacccccccccaaaactttttaaagggggttgtccttttttttaacaattttaaaatcccgccctttttttttgccccccctaaaaaaaaatttcctttttttgggg

SEQ ID NO: 61354 - DNA, 275 bp, Homo sapiens
actttttttttttttttttttttttttttttatttttttttaaaaattaaaaaaaggggttcattttttcacccaaggggaaaagaaaggggttttttaggggttaatgaaacccaaacccccaaaaacaaaaaaaacccccccccccaaccccccaaaaaaggggaaaaaaaggggggggcaacccacccggggaaatttaaaaaaatttttggaaaaaaggggttttttttcccaaagtgggtcaaaaaccccaaggttaaaaaaattttttt

SEQ ID NO: 61355 - DNA, 567 bp, Homo sapiens
  misc_feature 488, 489: n = A,T,C or G
acgcgggtgaaagatgtagctatgccttacactgctcaccacacagaacaaggcccattgcttggtgggacactttggattttggtggcaatgtattttgatgtgcttctctggtatatttaccagataacaataacccataagactgtcaggttttagtggatcccagaccaagaaaagggtctgcagtaagagtagactatagtgaaatctggtcttccatttgagtgttatgacttagtattgaaagtgtatgcagtcataaaaaggaatgagatcatgtcctttgcagggaatggagggagctggaagtcgttatcctctgtaaactaacacaagaacagaaaaccaagcactgcatgttctcactcataagtgggagctgaacaatgagaacacatggtcgcagggaagggaacaacacacaatggggcctgtcagggcgagggggaggaagagcatcaagataaatagctaatgcacacggnngcttaatacccaggtgatgggttgatagttgcagcaaacaatgatggcacacatttacgtatgtaagaaacctgcatg

SEQ ID NO: 61356 - DNA, 416 bp, Homo sapiens
acttttttttttttttttttttttttgggggagggggggggaacccaaaccccttttttaatgggggggcttttttagcccctcctggggggaaaaattttttccccttctcaaagggttttttccataggtcaaaaaagctttccctttttggacaaacctataaattcccagggggttttaaggggttttggggccaaattaaaagggaaaataaatttttttttggaacacccctttttccccggggtgggggggtttgcccccctccccttaaaatcccccactttttttccccaaaaaagggggggccttttttacctttttttaaggacccccctgggtttggggggtttaaattttggttccccttcaaaaattttttttggttaattcttttcccaaaagggttgggg

SEQ ID NO: 61357 - DNA, 252 bp, Homo sapiens
  misc_feature 13: n = A,T,C or G
tccaccgcggtgngcggcccgagtactcttttttttttttttttttttttttttttaatttttttttaaaacccctcccccccccaaacaaaggggggggaaacccctttcccccttttttttttttaccaaaaaaaaagggggccttaagggccccttttttttttttgggcccttgccaaaaaaaccgcccaaacccattttttggccccctggcccccggtttgggccccaattttttttttttttttt

SEQ ID NO: 61358 - DNA, 463 bp, Homo sapiens
tccaccgcggtggcggcgcgaggtacttttttttttttttttttttttttcggggagggggggggaataccactaaactctttatcagtcggggcgcggtttggaggctccactcttgtgtgttcacaatttatttgagggtttatttgcagggctttgtgcgtaatcatgaaaaaaactgttttttttggcccacccttaaatttcccagggggttttaaggggtttgggggcccttttaaaagggaaaaaaaaattttttttggaaaaacccttttttccgggggggggggggttttccccccaaaggaaaaaattcccccccctttttttcacccaaccggggggcccttttaagcttaaaaaagagaaggcggtttgttttcggggccccaacctttggtccccccccccaagggaaaaaaaaaaaacccttccccaaaaagaatgggggtcccccccg

SEQ ID NO: 61359 - DNA, 276 bp, Homo sapiens
acttttttttttttttttttttttttttttccctccttttttttttttttttttttttttttttaaaaatttggggaaaaaaaaaaaaaaaaccctttttttaaatccccattttttgaaaaggggtttttttaaacctcattaaaattttaaaaagggggggttttcggggggttaaaaaaaattttcccgggggcaaaaaaagggggccttccttttttccccaaaaaaaaacccaagggggcccccccccccccccaaaaataaaaaaagggg

SEQ ID NO: 61360 - DNA, 359 bp, Homo sapiens
acgcgggctggccaacatggtgaagccctatctctacgaaaaaatacaagaattagctggttgtggtagtcccagctacttgggaggctggggcaggagaatctcttgagcccgggaggcggaggttgcagtgagcaaggtgctgcaccaccgcactcctgcctgggtgacgaagtgaccttatcttaaaaaaaaaaaaaaaaaaaaaaaaaaaggccccccgcccctttaaaaattaggggccccccggggcgggggaatttaattttaactttttttatccccgcccccctgggggggggccccggcccccattttttttcccttttagggggggtaattgcccccctggggaaaaa

SEQ ID NO: 61361 - DNA, 339 bp, Homo sapiens
acttttttttttttttttttttttttaagggcgcccctttcctaaaatttttctttgggaacccttggcccttttaaaaacattttaaaggggtgcccccttttggccaatttccctatcccaaaaaccaaaccttgggtccttttttccagggccaaaaaaaaaaggggaaaaaaaaaaaccccaaaaagaaagggggattccgggcccccccccttttacccctttaaaaaaaatgaaccaattttttttttgggggaaacccccccccgccaaaggaccaaggcctgggtttcctttaccccttaggggcctaaggggattaaaaaaaacccccaa

SEQ ID NO: 61362 - DNA, 445 bp, Homo sapiens
actttttttttttttttttttttttaaaaaaaggattttttttttttcccccaggttgaagggaagggggggaatttgggttaattgaaacccccccctccggggtaaaccctttttttttgcttaaccctccaaagaagtgggaataaagggccccccccattaccccgggtaaattttttgttttttaaaaaaaaagggggtttaaccttttaaccggggagggtttaaatttccaaacctggaaacccccccccctggccctccaaaagggggggaataaaggggggaacccaccccccccggccgtttaaaaataaggggaccccccgggctggggaaattcaatttaaactttttcaatccccccaacctaaggggggggcccggcccccatttttttttccttttagggggggtaaatggccccctgggcaaaaaaagg

SEQ ID NO: 61363 - DNA, 303 bp, Homo sapiens
acttttttttttttttttttttttaaaaaagggttttttttttttcccccggttaaaaggcaaagggccaaaaaaaataaaagcccccctttatttccggggcaaaaactttccccccctttaaattttttaaacagggggaaccaaaggcccccccccccctcccaagggggtttgggggttttttggggggtttttttttgtttttgggggggtggtttttaaaaaaaaaaaaagttttttttttttccccagggttattttaaaccccggacccaaaatgacccttaacccccacccccc

SEQ ID NO: 61364 - DNA, 521 bp, Homo sapiens
acttttttttttttttttttttttttttttggaaaaagagggttttttttttttccccaaaagggggtttaaaaacccttgggttttaaaaaggggggggaaaaaaaaaacccccccccccccccccaaaaacttttttaaaaatggggggggaaaataaaaaaaaaattttttttttttaaaaaaaaatttttttttttaaaaaaaaaaaaaaaaaaggtttttggccaacgggttaaaaacccccccaaggaaaatttttttttttaaaaaaggggccaaaaaggggggaccaaaaaaactcttggtttggggaaaaataaaccggggggtaaattttttttaaaccccccccaatctttaaaaaaaaatttttttttttttaaaaaaaccggaaaaaaccccaaaaaaggatttccccccccaaaaaaaatttttttttttaaaaaaatttttttttttttaaaaaaatttttttttttttttttcccccccccaaaaaggggccttttttaaaaaaa

SEQ ID NO: 61365 - DNA, 209 bp, Homo sapiens
actttttttttttttttttttttaaaaaaaagggtttttgcaaggggtgcataaactccggggctaaataaccccctcacatcgtgtttacaaaatggggtaaatccatggttttacccccttcccctggcaaaaaaataaattctgggttgggggtttcaaaatggcatattttataatgtgggacgaaaaatttttttgcggggggg

SEQ ID NO: 61366 - DNA, 286 bp, Homo sapiens
actttttttttttttttttttttggggcgcccttttcaaaaattttctttgggaaaccttttcccctttaaaaaatttttaagggggtacccctttttggcaattttccttaaccaaaaaaccaacctttggctcattttttcaagggcaaaaaaaaaaggggaaaaaaaaaaacccaaaaaaaaaaggggttttctgggccccccccttttacccctttaaaaaaaaaaaaaacatttttttttttggggaaaaccccccccgccaaaaaaccaaaacttttttt

SEQ ID NO: 61367 - DNA, 465 bp, Homo sapiens
acttttttttttttttttttttttaaaaaaaaattggggccctgggggtttgttttaaaaaccattttggggggggtaaattccttttttttttgtaaaaattttttttaaacggttttttaaaattttgggggggggggggggcctccattatacccccccaggtttaaggggggtttttaaaattttggggggggggggggccctccattatacccccccgggtttaaggggggtttttttaaaaaaaaaatttttcctttaaaaaaaaaggttttcaaaattaaaaaaatttttaattttcccgggtgaaaaaaaaaaaaaacccccaaaaaaaaaaaaatttttaattgggggtttccccgggggaaccccaaaaaacgggggggttttccaaaaagcccaaaaaatttttgggaaaaaaaatttttatttcccccctaaattttttttggaaaatgtttt

SEQ ID NO: 61368 - DNA, 290 bp, Homo sapiens
actttttttttttttttggaaaaaccggggtttatttttgtgcccagggtgggtttaaaaccccggaactaaacaattcctcttgcttggcctttcaaaacccttggatttccgggcttaaccccccttcccggcccaaaaataaaaactttttttttttaaagggccttttttaaaagaatgggcacccccttgggggaaaaatccctccaaaatttttttcaaaaaaaaaccccctaatttttttttttttttaaaaaaccccctacaattcattttaaaaaaaaaat

SEQ ID NO: 61369 - DNA, 139 bp, Homo sapiens
tccaccgcggtggcagctgacagatgttactgctatctaaaagtacaggtttgaccctttcttacgtggttggttgatccttatgcatgtgggctggagatgaacaagtaattttttcaggctgacgtcatagttttgt

SEQ ID NO: 61370 - DNA, 553 bp, Homo sapiens
ggcggccgcaccggcgcaggttacgcgtggtattgtgctcacagttctggtacttataagtccaacaccaagttgtcagtatggttggttccttaaaagctgtgagagtgaatctgtaccatgcctttcccctaactttcgatagttaggtagcaatcctcagcattccttgacatgtagaagcatcactccaatctctaccttcagcgcttcacatgaaattctccttatgtctgtctccaaatgttcccttcttctaggattgccagtcaaaatggattaaaggtccatcctgcttcaatatgacctcatcttatctaactatatctataatgaccctatttctaaatgaggtcacattatgaactactagaagttaggaatttaacatatgatttttgaagggagatgcaattcaacccttaacagcccacaaaattagttgcccttgtgttattcactatgtgtttgaaattgtgcttgttgtcacatgaagtagaaaaatatgtcatgatttttactgtcaatgaattttctttactggacacatgaa

SEQ ID NO: 61371 - DNA, 205 bp, Homo sapiens
actttttttttttttttttttttttttttcctaggagagggaaaaaatgagggtttggggttctttaattggtttctccggcccggagaaaacctccccaaaaagggattttttttcaaccccccgggattttttttaaaattgggccccccccccggggaaaaatttttaaaaaaatttttttgggggaaattttttttaaaaa

SEQ ID NO: 61372 - DNA, 305 bp, Homo sapiens
actgcagtggtgccatcatagctcactgcagcatcgaacttctaggctcaagtgatcctcctgcctgtgccgcccaaagtgttggaattacaggcatgagccactgcttctagatggatgtcttttattggcgggggggaaagccctatatacgtatatatgtattttttactaattctaaaactgctaacccaagcaggacaaaatttaattgaataccaagaaaataaccatgccagattttcatgctaaatcagctaatactaacattgtttagatacgcaatttgaatgaactccatggtc

SEQ ID NO: 61373 - DNA, 357 bp, Homo sapiens
  misc_feature 155, 331: n = A,T,C or G
acaacattcctgcccctccctgctgaggtggtgtcagactcctctgacactaatggagatcaagacttttaccattgctgggtgataacaaggctacccctaaagctgtgccaattaagaccacacaggagctataacccctacataaacaacangaaaaaaaatactgagaaatgaacatagcttcaggtgtccatggaattataataaaagatataactttcatgtcatcagagtctcgagaaaacagaatgcagcactgaaaaggtgcctgattaagaaataatggctaaaaacttcccaaatgttgcaatagacataaatgcagatntaagaagctgagaaaaccccaatcag

SEQ ID NO: 61374 - DNA, 129 bp, Homo sapiens
tccaccgcggtggccggccgcccgggcaggtactttttttttttttttttttttttttttgggaagggggttggggttttttcgccccccctggccccggggaaaatctggggttaaaaaaaatttttt

SEQ ID NO: 61375 - DNA, 338 bp, Homo sapiens
cggtggcggccgaggtactttttttttttttttttcacaggcctttttaacccatttttgggtttaattttttttattttttaatccttcccaaaacttggtttaacctggttttcatttttttatcaaaacctttgaaaaatttttcattttttaacctggttccattctcccaatttttttcaaagttggaccttttgcccctaaccttttggttcccaacctggttttttttttcgggctcccacctttaagggtaaaaattaatttttttttttcaaaaagagggttttaatctcaaaatcccccaatcttccatattttttttttcccttccc

SEQ ID NO: 61376 - DNA, 264 bp, Homo sapiens
tccaccgcggtggtcgagcggccgccctggcaggtactttttttttttttttttttttttttggattgaaaaaaaaaaaaaacccttttttttttaactccttctaagggaaagggctaaaaaaacaaaaaaaggggggggggtctttttttttaaaccccccccccggaaaaaccccaaaatttttaaccctttccctcccccccccaaagatttttttggggttccccccccccccttaaaataatgggaaaaaaatataaa

SEQ ID NO: 61377 - DNA, 485 bp, Homo sapiens
acttttttttttttttttttttttttaaaaggccccccagggggccccccccctggaaaaaaaaattttttcccgggggattttttttggttttttaaaaaacaaaagggccaaaacccctttggggggccccttaaaaaaagggggggggggcccttccccctaaaaccccccttgggggccccccctccaaaaaaaatttttcccctggtaccctttttgaaccggcccaaattttttttttttttgggccccaaaaaaatttttttttccccccctttttttttccccttttaaaaaaacccctttttcttaaaaaaaattccccccctttcccccccgggggggccttttaaaaaaaagggaccccccccgcccggaaaaatttttattaaccttttttccccccccccccccgggggggggccccccccccccctttttttcccttttaagaggggaaaaaccccccccgggaaaaaaaa

SEQ ID NO: 61378 - DNA, 401 bp, Homo sapiens
actgaccccaagccctgggcaggcaaggtctccagggaagattaagagaggaagctcaagaaggacaacaagggagagggttccccatttctttcgtatttgtttgtattcttttctacttcttttctgatctcctttttgtcccctagatggtgaccaacctgccctgttctgtgacactgcagccaggtcctgaagatgcaggaaaggtgaggactgggttctaagaaagagggataggtagtgccagggaagaggaacagtgggacagtcaagactggagaaatggacagctaaggaaagatgtcaggcattttcttataggcccatgacgaagggaggacagcactggaaatgagctctctttgcccttgtccctttacagccctgtgggattgact

SEQ ID NO: 61379 - DNA, 333 bp, Homo sapiens
acataactgtgggtatgcattgctgctctattgtggagtgtagtttggctgggtacatactttcctattatttttctcttgaattttgaaagtcagaaagctaaaaatgcacaaaatccagtctaaatattgtctatagttttttaggattatagtgtaatctgctcttttaacttatgtatctctacagcctgccaccatataagcttttaattataaaattatgatgcttgacattggggagaaaagaacatgagcacccataatgagtcattctttgttgactgtataaataagtcagaagttacatgtaaggatgagaatatccctcct

SEQ ID NO: 61380 - DNA, 543 bp, Homo sapiens
ccaccgcggtggcggccgaggtacttttttttttttttttttttttttttcccaaaaaaacccttaccctccctttgggacccctggaaagcccttaacccaagggggggctcccttccggccaaaaaagggggcctttttttttttttaaaacaaaaaccttaagggaaaaattttcccccccttttttttggttggggggggaaaaaaaaaaattttctttggggggaaaaatcctaaacctgggggttacccccccccccaaaagcccgggggggccccccccccctttccccaaaaaaagggcccccctttaaaaaaccgggcttttttggcctaaaaacgggggggggaaagggttccccccccccgggaaaacccccccttttggtttttttccccaccccttccaaaaaaaaattgccccggggaaaccccaaaaaaaaaacccccccccgggcgccccctttaaaaaaaggggcccccccggggcggggaatttttttttaacccttttctaccccccccccccggggggggggc

SEQ ID NO: 61381 - DNA, 294 bp, Homo sapiens
actttttttttttttttttttgggaaaaggaggggccccactttccccccttttttaattttaaaccccgggttaaaaactttttttctttctaaccccccaaaaggggggggtttacggggttgacccccccaccccccttaaaaaggaattttggggcttattttaaaaccaaaaaaattggggttaccttttttttttaaaacccccttttttaaagggcccttttaaaaaaaggggtcaaaattaaaaacaaaatttttcccccccgattttttttttttaaaaaaaaaa

SEQ ID NO: 61382 - DNA, 290 bp, Homo sapiens
acttttttttttttttttttttttttgggccttggggccttttttggaaaaagggtttaaaatcccccccctttcctaaaggggccttaaaaaaagggggttttaaattttaaaaggggttttttaaaaaaaatttttcccctggaaaaacccctaatccctaatttcccaaccttaaaccgggggcccctttaaaaaaaaattttttttttcgggaaaaaccccttggggttttttttaaaccttttcccatttttcccctttaaaaaacccccttttaaaggaaaccc

SEQ ID NO: 61383 - DNA, 244 bp, Homo sapiens
acagtgcaaaacataggaagggacacagcttcaatgccctctccagacatgccaccttccagtaacctcagctacctagctcactgacctctgtccttgtgggttttcatgaggcttcattatacaggcatgactgattaaaccactagccattggtgaacaattaaacctacagcccctctccccaccccctctaatcacaccttggtctctccactgactagcctccagcccgaagctacct

SEQ ID NO: 61384 - DNA, 292 bp, Homo sapiens
actagagaaaactggtaaaagcaaaacaaaaaatgttttttaaatcaaactcttaagagagcaaagaagcaaagtaaaatagtgatgggctcacagcccatcactatcaagaaaggaataaaatatcttgtgaagataatattttaacagaggaaattgggagggtatcagccaagcgttgccagctcagagaacaggtggcttagaaagcaacaagtaaagcagggcccccaagaaattctaaaaacagctggagaatcagaggaactttcacactgctgcgggaatgctc

SEQ ID NO: 61385 - DNA, 170 bp, Homo sapiens
ccccgcggtggcggccgaggtacttttttttttttttttttttttttaaatttaaaaaaaaagaggggggttaaattttggggggggggggggttaaaaagggggaccccccgggaaccccccccccgggccccccagggggctaaaaataaaagggggaaccccccccc

SEQ ID NO: 61386 - DNA, 153 bp, Homo sapiens
actttttttttttttttttttttttttaaaatattttttttttaaaggggaatttttttggatttccctttttaggcccattatttttgggaaaaattggggtgtttttttttttcccccccccccttttttttttccctttttaaattttgg

SEQ ID NO: 61387 - DNA, 282 bp, Homo sapiens
actttttttttttttttttttttttttttttttttgggtttaaaaaggggccccttttggggaaaaaaaaaccccccccttgggggggggggatcccttttttttcccaaaaaaaaatggccccccctaaaaaaaaattcggggcctaaaaaccgggaaaagggggtttttaaaaccccctttcccaaatgggggccccctttttttttttccccccaaaaacccttttaaaaaaaaaagggggctttggggcccctcggggtcccccgggccaaaatgggg

SEQ ID NO: 61388 - DNA, 309 bp, Homo sapiens
actttttttttttttttttttttttttcccagcccaaaaaaggggtttttttaaaaaccttgaaaatttgggggggttttttttggtggttttcccccccccaaaaaaaaaaaaatttttttttttttttttttcccccggggagttcccctaaaattaaatttaacgggggggggtgttttttccccttcggggcccaaaaaaccccgggtttttttttttttaaacaaaacggggcaacccccaaccttttttcccaaccccccgaaaacccaaaaaaaaattttggatttttttttttttttcccc

SEQ ID NO: 61389 - DNA, 254 bp, Homo sapiens
acttttttttttttttttttttttcccaaaacccttaaaaattttcaaaaaaaatttttcagcttcttttagggccccttaaccaaaagaggttttccctaattttaaaatggggggaaaaaatttttcaattttttggggggggggatttttttttttttaaaaagggggaacccccctaaaaaggggggttaaaaacccttgggcttttttggaagttcccggaaaccaaacccaatttggaattttccggg

SEQ ID NO: 61390 - DNA, 196 bp, Homo sapiens
acttttttttttttttttttctgaaaggagtctttttttttttcttataaatccccgtccccctaaaggggggcccggtccccaggtgaaaaacccttcattgcccttagggggggcgcttgcaaaaaaaatggggtaccccttttctggggcctttttttttggggggaggggaaaaaccttccttttttttccc

SEQ ID NO: 61391 - DNA, 504 bp, Homo sapiens
acttttttttttttttttttttttttttttttatttcccggggggttttttccgggttttttttttaaaaaaaaggttttttcaaccccccccttttttttgggggaggggtttttgccccccaaaaaaattttgggggttttttaaccccccgggggggggggtaaaaaggggggggttttggggaaaaaattggggggggggggggaaaacccctaggggggggatcccgcccttataaaaaggggccccgggggcccttttttttcttttccccgggggaggcccaaataaagggggttttttggaaaacaggaaaaggggccccccccgaaattgagtttggtaggggtttggattgggacctccccccccttaaaaatttaaaaaaaaaaaatttttttggtttaaaccccccccatttaaaaattttgggtaaaaaaaacctcgggggcaaaaacccccgtttttttgggtttggggtcccaaaaaggcttttttttt

SEQ ID NO: 61392 - DNA, 467 bp, Homo sapiens
  misc_feature 419: n = A,T,C or G
acactgagcagaattaaacagggtagtcttaaccacactatttttagctaccttgtcaagctaatggttaaagaacacttttggtttacacttgttgggtcatagaagttgctttccgccatcacgcaataagttcgtgtgtaatcagaaggagttaccttatggtttcagtgtcattctttagttaatttgggagctgtgtaatttaggctttgcgtattatttcacttctgttctccacttatgaagtgattgtgtgttcgcgtgtgtgtgcgtgcgcatgtgcttccggcagttaacataagcaaatacccaacatcacaaagatgatctttcttcttttaacttgatgatgatgtgcaggcacaaatcttgggagaaggcttaactgtagaatagatgaattctagaactcttgnaccctgcatgagaaactgtgacagatctgtgtcaattaacttgattag

SEQ ID NO: 61393 - DNA, 299 bp, Homo sapiens
acttttttttttttttttttttttttttttcccttttaaaaccccaaaaaaaattttttaaaaaaaaaaaaagggcctcccgggtttggggtccctgggggggggggggggttccccctacttaccggttaaaagggccctggggggttccccttccctaaaaaaaattccccccccccccccttgaaaaatttccccttttttttttttaaaaaggaaaatttttttttgtttttttcccgggcccctttccaaaaaagtttaattttttttttttaaaacccaacttttaaaacttt

SEQ ID NO: 61394 - DNA, 365 bp, Homo sapiens
  misc_feature 40, 336: n = A,T,C or G
ggataccgtcgttatggtactagctgttgtgctgaatggnagctccaccgcggtggcggccgcccgggcaggtacttttttttttttttttttttggcttttggtttttgaaaaaggggtctaattttgttccccaggtggaattgtaggggcttaaacacagttaattgaaccctcaatttccggggctaaaggaatcctttggcctaaccctaccaaatagttggaaccacaggcttgtcccaccatgccgggtaaatttttttattggaaaaaaccaggtctacccttgttgttcaggctaaggaaaaagtttttcttaaaaaaaaattttanaaggggctttttccctaaatttattgaat

SEQ ID NO: 61395 - DNA, 422 bp, Homo sapiens
actgaggaaaaaacaagagcaaagggtcagaaaatttaaagaatagagtatgtttaactaaagacactgcttttgtattattatcaaatcatactattgtcttatatggagaactttagccacgcctcttcaattcaattcaaagggatttatacatccacacatacaaaaacagtaggaacaatatacttgcctatttgcttatatacttataacaaatctctggaagaaaacatgcagctgctaaaactgtttgcctccaggagggtagactagtggctgggggacaagagtaggaaggagattttttactgttttattttttgtatcttttgaatttggacccaagtaaatatattatcttaaacaaacaaacaaaaaaggccaggtgcaattgctcatgcctgtaatcccacccgcgt

SEQ ID NO: 61396 - DNA, 361 bp, Homo sapiens
gatacatcggcaatcaactgacttacctttggtgtctagaagagaagctccaccgcggtggcggccgcccgggcaggtactttttttttttttttttttttttttttttttttttaaaaaaaaagggggtttaacccttttaacaaaaaattttttatttttcaaacgggggaaaccccccccctgggccccaaaaagggggggaataaagggggaaaaccctttcccccggccttttaaaaaataggggacccccgggggggaaaaaatttaattaaaatttttttaaaccccccaccctggggggggggcccggcccccatttttttttcctttaaaggggggtaaaacccccccttgg

SEQ ID NO: 61397 - DNA, 458 bp, Homo sapiens
  misc_feature 15: n = A,T,C or G
caccgcggtggcggnccgaggtacttttttttttttttttttttttttccaaaaaagggtcccccgaaaaagggccttgccctccccaaaatggaagggggaaaaacccgggttttaattttaaaagggggggttttagggggcccaaaaaaaccggtgggaaaccaccaaaaagggtggtgttaatttggtaaaaaaaaaataaaggggaaaaccctaaaattacccctggggggggttgtttaaaccaaaatattgtttttttgaaaaacccttcccaggggaaaaaaaaaattggggggaccaataattttaaccttggaaaagggtaaagttatttcccccccccggccgcccctttaaaaccaagggacccccccgcccgcgagaattccaattcaaccctattcaacccccccaccctaaggggggcccccgcccccaacttttttcccctt

SEQ ID NO: 61398 - DNA, 543 bp, Homo sapiens
tccaccgcggtggcggccgagtaccttctgatttttaaaaataattaacatatcttatgcaactaaaaatatactgtcaaacctatttaaaacatcttattctacccagcctgcccagcttttgatgtaattggggaagaaggttcagtaacagatgattttaacataacaggttgggctatgattgatatgttaattgagtgctcttcagagaaagggtgatccataaattcaatctagatttttaggaaaggtttcttggaggaaacaggggctgaattgactcttaagtaataattaccaaagagaggtgtggagctgatttcaggcaaaggtgttgaataaacaacatggaacagatatgttgggaactgtaagtagtgtattacactgttttgcattgctataaaggaatatctgagactgggtaattaataaatgaggtttattttggcttatggttctataggctgtgtaagcatggcaccaacatctgcttggcttctggtgagggcctcaggaagtttacagtcatggtggaag

SEQ ID NO: 61399 - DNA, 152 bp, Homo sapiens
actttttttttttttttttttttttaaaaaaaaaagggtttttcccggggggttaaaaaacccggggtttaaggaatccccccccctgggtttccaaaaggggtaaaatataagggttaaaccccttcccccgggccaaaaaagtttttttt

SEQ ID NO: 61400 - DNA, 217 bp, Homo sapiens
actttttttttttttttttttttaagggcccccccttcccaaaagtttaccttgggaacccttgacccttctaaaaacctttaaaggggtgcccccttttggccatttggcctaatccgaaaaccaaaccttggggccatgtttccaaggccaaaagaaaaaagggaaaaataaaacccctaaaaaggaaaggggattccaggccccccccctttta

SEQ ID NO: 61401 - DNA, 298 bp, Homo sapiens
acttttttttttttttttttttttttaaacctttcccttaaccccgggggaaggggaaaaccccccctttttttcccccttttaatggggaatttaaaaaggaaaattcccgggggggggttaaaccccctaaaccttttggtttccaaaaacctaaattcaacccccccaatggggaaaaacacccattccttggggtttttcccccccaaaattttcccttttttaaggccctggggggaaaacataagggccctcaaaaaaaaaaagggctttcccaagggctttaaattggggg

SEQ ID NO: 61402 - DNA, 478 bp, Homo sapiens
acccctgtgacatagcaaaggtgtttatgcaaacctgacttaaacctagggcccttaaaccataacaattgccacctgggaggcacctaagcctgacaatactgaggctctctggaagaggactttttataaatataggcagagtagaggcgaccctccctattgaagtatatccagtgacaaacagaaaaaaggagggagagaaagaaacctggatacaggaggagagaaaatttaaacatatgtgcatatacatgtttaaatttatgtaatttatatatatgtaattaaattaaatcataggtccacaatttggcccaatttgaaattcaaaatttactagaaataatttaaacagcaaaaagataaagaagtgttaattggctttagtgtctctatgatataggtcctgaattcactttaacagctgttgaaattaacaattcatggaccttcatatacttcaacactagggctc

SEQ ID NO: 61403 - DNA, 301 bp, Homo sapiens
acctcctgccctgtaggaggggagggggcaaagccttctgacttcacctttgtttgacctatgtatggaacttacttttactttttgccttaaatttttaatgaaatgcaaattttctgtgatggggttctctctctctttttttcggggggtggagtcactaataaatttgcaaatgaagttaaagacaaggcaaccatctggcttatgctatataatacttcatttaaagaagaaaggaaaagcaaatgcacttgcagcttttgaggtctcagcaaaaatgggcatgtgtcttttttga

SEQ ID NO: 61404 - DNA, 303 bp, Homo sapiens
acttttttttttttttttttttttttgccccaaccaaaaaattttgggccccctttttttccaaaaaattttttgggaaaaccaaaaaaacccttttttttttaaaaccccaagggccctttttgggttttaaccccccttgagccaaaaaaattttttacccggggggggccccccccccttttaaaccattttttaaatggccttcaaaaaacccattctttttggtttcccccccccctacccggattttttttggggggttttttgttttttttttttttttaaacctttaaaaaaagg

SEQ ID NO: 61405 - DNA, 478 bp, Homo sapiens
acttttttttttttttttttttttttttggggggggaaaaatttttgggtttttttttttcccccctttttaaaatggggccccccctttttaaccggtttttttttaaacccaaaaaaaaattttttttcttttaaaaaaaccctttggcccgggggaaaaaactttttaaaaaccccctttttttttttagggggaaaaaaaaaaaaaggggttcccccccccccacctaagaggaaagggggggggccaaaaaaaaatttggggggcccccaatttgttttagggccctttcccccaatttttttttttttttccaaaaaaaggtttcccgggggaaaaaaaaatttaaatttcccccaaaccccccccttaatcccttttaaaaaaaaaggggggccccccccggggcccattttcccttttgggggagcggggccaaaattttttatttttaaatttttcgggggggataaaa

SEQ ID NO: 61406 - DNA, 179 bp, Homo sapiens
actttttttttttttttttttttttgaaaaagggattccctttttttatttagggggaaaaagcaagggggtaaattaaatttgttgaaacccccccccccggggttaaaaaaattttttttccctaaccccccaaagaggggggaataaaggggggggccaacattcccaattttttt

SEQ ID NO: 61407 - DNA, 491 bp, Homo sapiens
acgcgggtagaatcttcctttgcctgagaaccctactctctgctagatgacagcaaatgcagtgaattcatgttgtaattatgactttctgcaccttgaaatttggtgactggaaattttaggcattgctgttgattagtagggaaacatacatttaatttttcttcctctgctcctgtctgcctgcaaatagaatttgttacagtttttctggtagcgtatagacaccaggttgagtacagggcctattgttgactgattgttgcctccggcagaaagagcgagcagatttcctttacaacactattccagttaaagagtagtggccgggagtgatgggtgatggctcacgcctgtaatcccaacactttgggaggccgaggagggtggatcacttaaggtcaggagtttgagaccagcctagccactatggtgaaaccctgtctctactaaaatacaaaaattagccaggcgtggtgggtgggtgcctg

SEQ ID NO: 61408 - DNA, 328 bp, Homo sapiens
gttgtgcctgattggagctccccgcggtggccgacggccgccgggcaggtcgggaggcgaaaaagaatgagaagaagggaaattagaagaaaaaacatacttttagaagaaaaaagataaatttaaacctgaaaagtaggaagcagaagaaaaaagacaagctaggaaacaaaaagctaagggcaaaatgtacaaacttagaagaaaaaaaaaaaaaaaaaaaaaaaggtcggggggggggaaaaaaaaaattgaaaaaatggggaattttaaaaaaaaaaacctttttttaaaaaaaaaaaaaaaattttaaccccgaaaaggggga

SEQ ID NO: 61409 - DNA, 294 bp, Homo sapiens
ctccccgcggtggcggccgaggtacttttttttttttttttttttttgggccccccctccccaaaaataacctttggaacccctttcccctttaaaaacctttaaagggggtccccctttttggcaattttccttaaccaaaaaaccaacctttggtcccttttttccattccaaaaaaaaaaaggggaaaaaaaaaaccccaaaaaaaaaaggggattcccggcccccccccttttaaccccttaaaaaaaaaaaacccaattttttttttggggaaaaccccccccccccaa

SEQ ID NO: 61410 - DNA, 492 bp, Homo sapiens
actttttttttttttttttttttaaaaaggggttctattttttttccccggggggggggggggggttttcccaggggccaattaaaaaaaaattaacccttaaaccccgggaataaaaaaatccttctccctaaccccccaaattaaggggaaacaaaggtttggccccccatcccaaatttttttttaattttttttaaagggttttggccccaaaaattaaaaattttttttttttttttaaaaaaaaaaggggtttcaggattccaaaaaaccgctttaaaaaagaccttcaaaaaaattatgggtggaaattgggtttttaaaaaaaccctttaaaaaagggcaaaaccttttttcggggggaaaaccccttaaagggaaagggcaaaaatttttttaaaatccccctttaccccccgccaaacccccaaatttttccaaacccaaaaaatttttgggaaaaaaaaaatctggccgggggaatttttt

SEQ ID NO: 61411 - DNA, 532 bp, Homo sapiens
tccccgcggtggcggccgaggtacttttttttttttttttttttttcgccccccactcccgtaaaaactatccttgggaaacccctcgcccctttaaaaaattttaaagggggaccccccttttgcccaatttcccaaaccaaaaaaccaacctttggctctatttttcaagggctaaaaaaaaagggggaaaaaaaaaaccccaaaaaagagaggggattcccgggcccccccctttttcccctttataaaaaaagcacccatttttttttttggggaaaacccccccccccaaaaaccccaggcccgggtttccttttcccccttggggcttttggggagtaaaaaaaaaccccaaagggcccccaagtttggggcccttagaaaaaaccccccctttccccagaggggggtccccctaggggtttgggttttccccgcgggccctggttcccctggggaaaaacccttccagccttgggccctcttaaaaccaaaactcttggggggggttttttttacccttcttttt

SEQ ID NO: 61412 - DNA, 245 bp, Homo sapiens
acttttttttttttttttttttttttataaaaaaaattctatttttgtgccccgggattttttcaatctattgaacccctcttcgggggtaaaaggaatcttggcccccacctctctaaaaaggtggttttaaaagacgccaccccccccccgagatattttttttttttttaaaaaaaaaaaatttttttttttggggccggggggcccttaaaacttctaccccttatttagaaccccccccc

SEQ ID NO: 61413 - DNA, 163 bp, Homo sapiens
acttttttttttttttttttttttttgggaaaaaacaaccccctcaaaaatttttgaaaaaaaaagccccccttttttccttggaaaaaaaaccctaatttttttttttccaaaaaggggttttaaaaattcccccccaaaataaagggggacccaaaaaaaa

SEQ ID NO: 61414 - DNA, 288 bp, Homo sapiens
actttttttttttttttttttttttttttttaaaccacaccttttttttttttttttttttgggccccctttaaggggggggggaaaaatttttttgaaaaaggggtcaaaaatttttcccccctggggaaaaaaaaaaaaaaaacccccctttttttttcccctggttttttgggggaaaaaaaaaaaaaaaggggggggggggaaaaccccttttaaacccggggccaaatttttttcccctttaaccccccttggggggacacccccctttttttaaaaaacccc

SEQ ID NO: 61415 - DNA, 332 bp, Homo sapiens
acttttttttttttttttttttttttaaaaaaaaatttttttttttgcccccggggataatttaaattaatggaaccccttttgggggaaaaaaaaacccctcgccccacccccttaaaaaaggggttttaaaaaaggcccccccccggcccaaaaaaatttttttttttaaaaaaaaaaaaatttttttttttgggggcgggggggccctaaaactctaacccttctatttaaacccccccccctttttccccaaaagggggggtattaaaggggggaaccccttttgcacaaaaaaaaaaggttttttttaaaaaaaaaatttttttttt

SEQ ID NO: 61416 - DNA, 327 bp, Homo sapiens
tccaccgcggtggctggccgcccgggcaggtactggctcagacaaaactaggaaaagaggtcagattttggatgtattttgaaggtaagccttcagaatgttctgatgggttggggtgagatgtgagtaaggaggtgaagaaagacgaagggagaggagatgtgaggagtcacggctgattccaaggtttctggcctgagcaattggaaggatggactgtatcaactgagatgagaaagactgctggtagaaaaggtttctttcaggaagattagcagtttagttttcagcttgattattaatttgagatttctactaaatatccag

SEQ ID NO: 61417 - DNA, 281 bp, Homo sapiens
acttttttttttttttttttttttttttggggcccaaacccttccccaaattggccccaactttttttttgggggaaataaaaatttttttaaaaaaatgccttttcccaaccccaaaaaaaaaaaatttttccctttttgcctttcgaaaaaaaaaatcctgtttaaaaacaaaacctttgaaaataaatttttttgaaaaacaaatggcaaaaaatttttccccttttttcctttttttcccaccccggccgggcaaaatttttttggttttccaaaaa

SEQ ID NO: 61418 - DNA, 307 bp, Homo sapiens
actttttttttttttttttttttttttgggggggcctggtaaaaccaaacccaatttttttccctttaaacccccccttaattaaaaaaaatttttgggaaaacctttgaaaaaaacccccggccccaaacccctaaaaaggtttttaaacccttaaacccaaaattttaaacggggggaaaaatggggacaaaccccctttttttttttttttgaacgggggggcctcccccccccgggaaaaaaaggcctttttaaaattttggtttggtttaaaaaaggggtttttttggttcccccggggggg

SEQ ID NO: 61419 - DNA, 150 bp, Homo sapiens
acttttttttttttttttttttttggggagatagggattaaacttaaccccctttctaacggacggctgttttactagcaaaaaaagcgggataaatttttttctgccccttaaaagtttttctttgctttcaaaaaattctccgttttt

SEQ ID NO: 61420 - DNA, 293 bp, Homo sapiens
actttttttttttttttttttgggaaaaagagggggccccctttccccccttttttaattttaaaccccggggccaaaactttttttctttcttacccccccaaaggggggggattacggggttgacccccccacccccgttaaaaaggaatttttgggccttttttcaaacccaaaaaatttgggttcacttttttttttaaaaaccccttttttaaaagggccttttaaaaaaaggggttaaaattaaaaaaaaaaattttcccccccgattttttcttttttaaacaaaa

SEQ ID NO: 61421 - DNA, 293 bp, Homo sapiens
acttttttttttttttttttttttggaaaagaggggttcccttttttcccccagggggggggttaggggggaaattttggtcaaataaaacctttccccccggggtaaaaaaaattttttttccccaaccccccaaaaaaaggggggtaaaaggccccttcaaccaacccaaattttttttttttaaaaaaaaagggggttccccctttttaaaaaggggggtttaaaaacccccccccaaaaaaaatccccccccccccccccccaaagggcttaaattaaggggttaaccc

SEQ ID NO: 61422 - DNA, 287 bp, Homo sapiens
acttttttttttttttttttttttttttttttaaaaaaaaaattttgctttttcccccaacctaaaggccaggggctaaatatgggttaattgaaccccaaccctcgggggtaaaacccttctttttgcttaaccccccaaaaaagggggaactacggggtggccccccccccccccacttattttttaattttttaaaaaaaaaaaggtttaatttttttccccaggggggtaaaaaaccccgggtttaaaaaaacccccccccctggccccccaaaagggggggg

SEQ ID NO: 61423 - DNA, 190 bp, Homo sapiens
acttttttttttttttttttttcccccttccaaaaaaaaatttttggtaatttaccccaggggggttttaaaccccggggctaaaaaaatccccccccctgggcccccaaaattggggggattaacgggggaaccgggaattaatgggggggccaattttttttttttttttttttaaaaaaaaaaaaat

SEQ ID NO: 61424 - DNA, 279 bp, Homo sapiens
actcagaaatcctccaaaaactccaatctacaaagccctacaggatctaacacctgttaaggctctgacctcatcgtctgctctctcctcctttacactgcattccagccacaccaatgttccgagtggtcttcaaaaatgccaggcactctctggtctcagggtctctcaacttgttgccccctctactaggaagtaatctgtatggctcactttttcattcccttcaggtctttacccaaataatgtcaccttctcaaggaggacttccctggtcac

SEQ ID NO: 61425 - DNA, 296 bp, Homo sapiens
actttttttttttttttttttgggaaaagagggggcccaattttccccccttttttatttttaaaccccgggttaaaaactttttttttttctaaccccccaaaaggggggggtttacggggttgacccccccaccccccttaaaaaggaattttggggctttttttaaaaccaaaaaaatttgggttaccttttttttttaaaacccccttttttaaagggcccttttaaaaaaaggggtcaaattttaaaacaagatttttccccccggattttttttttttaaaaaaaaaaaa

SEQ ID NO: 61426 - DNA, 105 bp, Homo sapiens
actaaagttcgtacaaatactgcactttcaaactacattactagtccatacagagttatcctactattaacatctatctcactcgtcctggaatgtgcttactaa

SEQ ID NO: 61427 - DNA, 353 bp, Homo sapiens
gaactcgcgcatagctgctcactgtatggcgaatgggactccccgcggtggcggccgcccgggcaggtacaagacgtgtttgggcatgtcagggcgcggcaaaggcaggaagggtagttttgatgggaagagctgtttcggcgggaggggcagtttacagaatgggtggtcaggagtgaagaggacgctttccaaataaggaagagatgtgacttacagattgggactcgcaggagaagttgtttacagagcaggtagcttagaagaagggacaaggaagttgatctcgagaacaaagaacaaggaagttacaaattaaacctttgaagaggaacttagccatatctgacagt

SEQ ID NO: 61428 - DNA, 291 bp, Homo sapiens
acttttttactattattttctttctaaactctctactgaatatttccctgcttctcctgtgtttaagtgagaactgtgcctgactgagttctttggaagaatttttctcattgtgtcccccttatcagtcattactccacatggctcctatgatccaaaatggctaacattaggaccgttttattctgtcacttctgagtccttcatcatacttttctttcagacccaaaccatcttcatcttcccccttttgtaatttgaacatttcacaaatttcatctagaaattttt

SEQ ID NO: 61429 - DNA, 274 bp, Homo sapiens
acttttttttttttttttttttttttgggaaaaaaaaaaatcccccccttaaaaaattgggtttttttttaaaaccctttttttccccctttggggggaaaaaccccccccaattaaaaaaaaaaaaaaggccccccccgggccctgggggggggggaaatttttaacaaaggggtttttcccaaaatttttcaaaaaaaaactttttcccctcccccccggggggcccgccaaaaacccccccgcttggggtttttaaaaaaattttaaaaaa

SEQ ID NO: 61430 - DNA, 288 bp, Homo sapiens
accactgcactccaggccaggctacagagcaagaccctgtcttaattttttaaaaataacaaataggctagctagctgtgtatgcccttaaattcatcctaacggtaaatataaacccttgtatcctgaagtagatgtcatccaaggtcatgttttcataatccaggtaatctaaagtagtagttctcaagctgtggtgccaagatcaagagcagcatctgaaacttgttagaagaaatacaaattctcaagccccatgctaaatcttctcaatcaggcacttgaggt

SEQ ID NO: 61431 - DNA, 471 bp, Homo sapiens
actttttttttttttttttttttcaccccctggggaaaaaaccctttttttagcgaaaaaaaatttccaggaaaaacccctggggttccctcccagggtttttaatggctaaccaaccctaatttcccaaataaaaagaggttaaaaaaaaggttgggggttaaaccccccccttggaatggaaaaaaaaaattaaaaaattgacccccaaaaaaaaattttttaaaaggcaaaaaccccttttttaaacccaaggggccttaaaaaaaaccttgcccccctctttgaaaccccaaaactaaaaaactgggggggggccaccccccaaaggggggggggaaaaaaaaaaatttgaaatcaaaaaaaaaccggggccaaaatttgggccccgttttttttgaacttttaaaattagggccaaaaaaatttttttaaaagtttcctttattgggctaaaaaaaaaaaaaaaaa

SEQ ID NO: 61432 - DNA, 322 bp, Homo sapiens
ctccccgcggtggcggccgaggtacctttttaggacactgaccttatatcagctgccggcagactcgtcccggggtttctcgttcatctggtcagttttactttctctgctccagcagaccttcttcattcatgtccctgtatgtccctgtcggttcctgttagtccctgcaagtctcttctatttcctatttttccctattgtctctatttttctctatttatctctatttgtccctgcaggtccctgtttaggcaccacttgtgatggttactatgggactgaacaaagggggatgaatgcagaaatgaaaaacaaaaac

SEQ ID NO: 61433 - DNA, 390 bp, Homo sapiens
actttttttttttttttttttttttgggggcgtccctttccaaaaatttcctttgggaacccttgacccttttaaaaacattttaaaggggttcccccttttggccaatttccctatcccaaaaaccaaaccttgggtccatgtttccagggccaaaagaaaaaggggaaaaaaaaaaaacctaaaaagaaaggggaattcctggccctcccccttttaacccttaaaaaaaaatgaaccaattttaattttgggggaaaacccccccggccaaaggaacaaagcctgggttgcctttaacccttaggggcttaaggggattaaaaaaaacccgcaaagggccacaaagcttggggccttaaggaaaaaccacccctttaccaggggggg

SEQ ID NO: 61434 - DNA, 297 bp, Homo sapiens
tccaccgcggtggcggccgacgtaccaggttcttttttttttttttttttaagggggagaaataacaaaaattttttttccgaaaacctttaacccttttaaaaatttttaaaggggaaaccccttttggccaatttaaaaaaaaaaaaaccccaacttttgccaattttttgggcccccaaggaaaaacccggaaacccaaaaaatttaaaaataaaggggaaaagggggccctccccttttggcccggccaaaaaaaaaacccaacccggttttttgggcccccccccccccccc

SEQ ID NO: 61435 - DNA, 148 bp, Homo sapiens
acttttttttttttttttttttttttgggaacccccccctgggggggttacccgggggggaaaaaaaaccctggggggaaaatgaaaaattggggccttaaattgcccaccccggttttaaatcccccccccctttttcccgggaaaa

SEQ ID NO: 61436 - DNA, 314 bp, Homo sapiens
tccaccgcggtggcgagcggccgcccgggcaggtactttttttttttttttttttccggggttttttaaacccctttaagggacttattattcaaacctttttttaagggaaagcgggtttccccctggtgaaaaaaaaaaacttcgggaaaaaactttttccccccccttcccccggggttttttaaagaatcttttaaccccctttcccccaaggaaaattttaaaggttttggcccaagggggggccgaaccttctttttttaaaaggggttttccggtaaaagggggggggggcattaaaaaaattggga

SEQ ID NO: 61437 - DNA, 547 bp, Homo sapiens
  misc_feature 533, 539: n = A,T,C or G
acagtaacactgccatacaggtttgtagcctaggagcaacaggctacatcatatagcccagatgtgcagtaggatataccatctaggtttgtatctctacaatattcacacaaggaaactgcctattgacatattacttagaatatatccccatcattaagtgctgcataactgtatataaaggtgtgtgtatgtcttaccactacctcctaatccctttctctatttgaaattccaatttacatggtataattttaaataaaaattagcataatctaactaaaggtatactgtaacccctagaaaacaaatttacctgtttccagatccaggtctcctcctaactagctatttgactcttatctctgagtttgaagattttaatctataaaacaagaatagggccaggcacagtggctcatgcctataatcccagcactttgggaggctgaggagggcagatttacttgagcccaaagagttccaaaccggcctgggcaaaacaatgaatccctatctctaccaaaaaaaanaaaaanaaaaaaaa

SEQ ID NO: 61438 - DNA, 290 bp, Homo sapiens
actttttttttttttttttttttcaaaaacaaatttaattttttcctccccaggtggaaggaaaaggggaaattttgggttaatgaaacccccacctttgggggccaaaaaaatttttttccccaaccttaaaaatagtttaaaaccaagggggccccccccctcccccacttgtttttttgcatttttaaaaaaaaagggggttccccattttgggccgggttttttaaaacccccccccctaggggaaccccccccccttatttcccaaaagggtgggaataaagggg

SEQ ID NO: 61439 - DNA, 290 bp, Homo sapiens
actttttttttttttttttttttttttttaaaaaaacaagtcccttttttttttaattttttgaattcaagtttttaaattttttttcccggggttttccctagaaaaaaaaatggcccccccccctgaaaaaaaaaccctttttagggttttttaaaatttttgaaaacccccccgggcccgggggttcccccttttatcccccccctttgggggggttgggggggggggtcccaagggcaaaaaaaaaacccccttcctccccacccggggaaacccccttttttttt

SEQ ID NO: 61440 - DNA, 179 bp, Homo sapiens
acttttttttttttttttttttttggggatttttttcccccccggggacccgggcctttaatcccctttaaaaaatttaaaaaggggaaacccttttttgcccagggtccataaaaaaaaacccaaaaattttccaaatttttgggccccccggggaaaaacgggaaaaaaaaaaaatt

SEQ ID NO: 61441 - DNA, 342 bp, Homo sapiens
accgcgtatagctgctcacttgatgtgctaataggactccaccgcggtggcggccgcccgggcaggtaccacaagcagtgtggattaaaacaacagaaatgtttgtctcacaatttctggaggcttgaagtccttaatttcataatcaagatgttgactgggccacactccctcagaaacctgttgaggagaatcattccttgtgaattcctggctgctgattgttgccagcacttcagtctacctccacactctacctccattgtcacataggactcgcccctcatgtctctgtgtgtctattttgcctcttcatcttaaaaagacaccagtcacataact

SEQ ID NO: 61442 - DNA, 369 bp, Homo sapiens
accgcgtactcgtactcacttgttgtgcctgattggaagctccaccgcggtggcggccgcccgggcaggtactttttttttttttttttttttttttttttttttttcccccccaaaaaaagggctttaatttcccccccaaaaattaaaaaaaagggaaaattttttttggggcccctttccaaaaattaaaaaaccctttaaaaaaccatttttttttcccaaaaaaggggaaaaaaaaaaaaaccttttttccggaagaaaaaaggggaaaaggaaaaaatttccaaccaaaaccccaaaggaaggggccccccccctatttttaaattttcaaaaagggcccaaaaaaatgcccgaaacaaaccc

SEQ ID NO: 61443 - DNA, 341 bp, Homo sapiens
acttttttttttttttttttttttttgggaaaaaaaccttttttttcccccccgggtggaagggaggggcacaatttaaattatatgaaacccccccccccaagggaaaaaaaatttttttcccaacccccctgaaaaaggggaaaaaagaggccccccccccccccaaaaaaatttttttttttttttaaaaaaaaaagggttttcaattttttgaacaaggggggtaaaaactcctgattttggaaaccccccacctgggcctccaaaagggggggaattaaaggggaagaccaccccccccggcctaaaaaaaacccgttccccggggcctttaaaaa

SEQ ID NO: 61444 - DNA, 315 bp, Homo sapiens
acttttttttttttttttttttttaaaaaagggattttcttttttcccccaaggtgaaaggggggggccaaattttggtttctttaaaccccccctttaagggttaaccccttttttcttcccaaaccctctaaaaaactaaaaataaaggccccccccccccccccggggaaaatttttgttttttaaaaaaaaaaggggtttcccccgtttacccagggggggcccccttttctgaacttggaaacccccccccctggccccccaaaggggggggaataaagggtttaacccccccccccgggccttttaaaa

SEQ ID NO: 61445 - DNA, 170 bp, Homo sapiens
tccaccgcggtggcggaccgaggtactttttttttttttttttttttttggggggaggggtgggggggaaaaaattttttttccccccccccgccttaaacccaaggggggaattttaacccactgaaactttccccctaggggtaaaaaaaaattccaccccctccccc

SEQ ID NO: 61446 - DNA, 303 bp, Homo sapiens
acttttttttttttttttttttttttttaaaaaaaaaaattttttttttgggccccaggttgaaaaatggaagggcccaattttaatttatttgaacccccccccgggggggtaaaaaaatttttccgcccaaaccccctgaattggggggaacaaagggccctcccccccttgccgggaaaattttttttttttttggtttttaaaaaaaaaggggggtttatttttttgggggggggggtttaaaacccccgcccctggggaaacccccccctttggcccccaaaagggggggaaaaaaaa

SEQ ID NO: 61447 - DNA, 430 bp, Homo sapiens
actttttttttttttttttgaaaacaattttaattttgcccccaaggtggaagggcaggggctaaatttaagttaatggaaccttttgcctccgggttaaacccaatcttttggcttaaccctctgaagaagtgggaattgagggcacaaattgcaaacccgggtaaatttttttggttttttaaaaaaaaaggggtttcacccggttaaccaaggagggcttaaatcccccaacttgggaatcgccccccctaaccctccaaaagggggggaataaaagggggaaccaattgccctgggccccaaatttaacttttaatttttcctaaaaagtttgaaatttcaaaaaagtaatcccccgaaatttttaagcccaaaaaataaaatccaaaaatggttgggcttccaaaaggaaaaaaaaaccccttaa

SEQ ID NO: 61448 - DNA, 288 bp, Homo sapiens
acaaatagccttttgctaaactatttgttgaaaacagtcagtggcaattatttaatgtggcagctacctgaggtgataataacagatgaggctaccaagaggctgagcaaaacatttaaaaaggaaaaactgaagaatgatatgagcatagaaggttttgaagagctccaacatattcccaggaatctagaagtccacgtgcaagttcggggctatgcacctgctccagaaagatccgaggaggttctgagttctcatctgtgactaacctgaagtttctgtgtaagc

SEQ ID NO: 61449 - DNA, 304 bp, Homo sapiens
acttttttttttttcctttaatacatctgtagaagaaactaaaggttcccatttgtataaagggaatactaggtccctttgtaatttttaaaccaacctattcctaggcctgatttttattttgttgacccaaaattaaattaaaaggccaaccgtgggggcatgtccctgtagtcctagttgctgaggtaaaaggattgtttgaccccaggatttcaaggttgcaccaagctttaattgccccattgcactccacccttggcaacaaactaaaaccctgtttaaaaaaaaaacaaaaccaaca

SEQ ID NO: 61450 - DNA, 366 bp, Homo sapiens
  misc_feature 1: n = A,T,C or G
natactcgtgcatagctgcttactggtggaatacaaggaaatacactcgctgtggtctgagccgagttactgttttatttttttttttatttttttgggggttaaagaaaaaacgggtttaaacattttggaagggagggtttaaaactctaaatttcaaggaacccccccccccttgggtttccaagggggggggattaatggggggaaccccccgccccaaaacatttttttttttttaaagggattttgcaaaattttttgggaaaataaaataaaagggggggggttttttaccccttttttaaaaagggggggggaaaaaaacaataaagggaattccctgaaactggttaaccaaaaaat

SEQ ID NO: 61451 - DNA, 296 bp, Homo sapiens
acgcggggtggagtctccatagtaacttctgttttaggcaaagattatatttaaaatatttcacataatgtcctgaggaatcagaaagctcacactgagcgaagagttcatagacagtgatctgggctacaaacagacctcagaaatattgcagattcagttctagaccactgcaataaagtgaacattgcaataaagaaatccacacaaatttttttggttttccagtgcatataaaagttatgcttacccggccgggcgcggtggctcatgcctgtaatcccagcacttcgggc

SEQ ID NO: 61452 - DNA, 303 bp, Homo sapiens
tccaccgcggtggcggccgccgggcaggtactttttttttttttttttttttttaaaaaaggggttttttttttcctttccccaagagaggggaaaaaggggcttttttaggggtaaatggaccccaaattttgggggccaaaaaaaaccccccccccaaacccccggggcaattaaaaaaaaaggcttccccccccaaattaaagcaaatttttgttttttaaaaaaaaaagggtttttcccacttttgcccaaggtggtttaaaacttggggaacaaaaaaaaccccccccctgggccccc

SEQ ID NO: 61453 - DNA, 474 bp, Homo sapiens
ccaccgcggtggcggcccaggtactttttttttttttttttttttttttttttttttttttttttttttttttttttttttttttttttttttttttttttttttttttttttttaaaaaaaaccccccccctttggggggccccccccgcccccccccaaaaaaaaaaagggggggcccccccccccccccccggggggggggggggccccccccccaaaacccccccccgggggggggggaaaaaaaaagggggggcccccccccccccccgggggggggggggtttttttttagcgggggcccccaaaaaacccccccccccccccgggggggggggaaaaaaaaaaaaacccccccccccggggggggaaaaatataaaattcctccccccccccccccccgggggggggggcccccccccccccttttttcccctaaaggggggggagacccccccccccccaaaaaaa

SEQ ID NO: 61454 - DNA, 262 bp, Homo sapiens
actttttttttttttttttttttttttgtaagccccctcgggcaacataaattccttaagaaaacgattttttttttttttcccaaatttagcttccttattttgaggaaaaataacccctcttggcgtaatcaataggggtagcctgccccctgtttcccttgggggaaaacccaaaaccctggaaaaggggaaaaaaaaccttccttaaacccccggaaaccgggaaaattggaaaccaaaaaaaaacccgggaaaaaaa

SEQ ID NO: 61455 - DNA, 324 bp, Homo sapiens
  misc_feature 17, 30: n = A,T,C or G
tccaccgcggtggcggnccgaggtactttntttttttttttttttttttttttccccaaacccgggggaattccctttgggacccgggaaaaaaaatttttgggggggaaaaattttttgaaaagggaattttttggggacccccccttttggggtaaaaagggcccgggaaaagggcccaccgggccaatttttgggggggaacgggggtttttttttaaggggggggcccaaaaacccctttttttttaagggggggaggaattccccttttttaaaaaaaaaagggttttttttttttttccccgggggaacccccccttt

SEQ ID NO: 61456 - DNA, 491 bp, Homo sapiens
actttttttttttttttttttttttcccttttatctcccttttgaaaaaacctttttttaaaaaggccctccccccttttttttttttcctaaaaaactattttttttggggttttaacttgacaaacaaataccttaaaaaagggaaatccccccacttaaaaagggggccctccatttgccaaaaatttttttcctatacccaaaaatttccccatcaaaaaaaaaaaatccggggttttccttttcccccaagggggggtaaaaaataaaatttttccccctttcctttaaaaatcccccagggccttttttttttttttttaagccaatcccccgtttccttccgggggggcccttttaaaaataagggaccccccggccccgaaaaatttaatttaaaccttttttaaccccccccccccagggggggcccccgccccccctttttttcccctttaaaagaggtaaattccccccctgggcaaaaa

SEQ ID NO: 61457 - DNA, 343 bp, Homo sapiens
acgcgggctccgtctgaagactaaataatagaccaggcgtggtggctcacgcctgtaatcccagcactttgggaggccaaggcaggtggatcgcctaaggtcgggagttcgagaccagcctgaccaacatagagaaaccccgtctctactaaaaatgctaaaaaaaaaaaaaaaaaaaaaaaaatttccttccccgggggggccctttaaaaaattgggggaacccccggggcgggggaatttaattttaaacttttttaacccccccaccctggggggggggcccggccccccttttttttcccttttagggggggtaattgcccccctggggaaaaaaggg

SEQ ID NO: 61458 - DNA, 633 bp, Homo sapiens
  misc_feature 33: n = A,T,C or G
attcgcgttctggtactcatctgttgtgcctgnttgggagctccaccgcggtggcggccgcccgggcaggtactttttttttttttttttttttttttccgggaaaaaaaatttttttttttccccccgggtgggagggcggggcccaattttaatttatttgaacctttgccccccgggttaaaaaaaatccccccccttatttttttaaaaaggggggatttaaaaaaagggccccccccccgggggggggttggttttttttgaaaaaaaaagggtttccctttttttttaggggggtttaaaaatcccgggcttaaggggttttccttccttaaccttcggaaggggggggattaaaaaaataaacccccgggcccatcccgttttttttaaaaacttttttttcaaaattaaaaacaaattcccgggcccggcccttgaattggggaaaaaaaaaatttttttaaaaattttttaaaaattcccccccccccaaaaattgttaaaactttgggaaaaccctctttttgaaaatataaaaaaattcccctctttggcctttttttttttttttaaaggggggggcttcccccacggggaagggtttttggggcctttttttgggagagg

SEQ ID NO: 61459 - DNA, 618 bp, Homo sapiens
  misc_feature 34: n = A,T,C or G
gcgaccatggtactcactctgaggcctagatggnagctccaccgcggtggcggccgcccgggcaggtaccaagtagatgtgcaaggggatgtttattaataaataatatgaataaatgattgatctaacctataacatccccacatggtgatcacagggggctcccagtcacactgtctgctctgaaggtagatagctataaatcaggctctaacagccaccccgcagattagtttcctactgctactgtaacaaattaccattagtggcataaaacaacaaaagtttatcatgccacagttccataggacagaagtcctatgagtctcagtgggctaaaaccaagaggttcatagggctgagtttctttctggatgctctaggggaaattctctttcctcgccttttccagctctagagatcatccacattctgtggcttgtggcccttttttccatttttaaagaacgcaatgttatatccctctgactactgccccttagtttccttagtcacaattccctctcttttcctgcctaccttttaaaatattgaattgggcccaccgggataatccaggataatctccctattataagatcatctgattagtaatcc

SEQ ID NO: 61460 - DNA, 260 bp, Homo sapiens
  misc_feature 58, 59, 60, 61, 62, 63, 64, 65, 66, 67, 68, 69, 70, 71, 72,73, 74, 75, 76, 77, 78, 79, 80, 81, 82, 83, 84, 85, 86,87, 88, 89, 90, 91, 92, 93, 94, 95, 96, 97, 98, 99, 100,101, 102, 103, 104, 105, 106, 107, 108, 109, 110, 111, 112: n = A,T,C or G
  misc_feature 113, 114, 115, 116, 117, 118, 119, 120, 121, 122, 123, 124,125, 126, 127, 128, 129, 130, 131, 132, 133, 134, 135, 136,137, 138, 139, 140, 141, 142, 143, 144, 145, 146, 147, 148,149, 150, 151, 152, 153, 154, 155, 156, 157, 158, 159: n = A,T,C or G
  misc_feature 160, 161, 162, 163, 164, 165, 166, 167, 168, 169, 170, 171,172, 173, 174, 175, 176, 177, 178, 179, 180, 181, 182, 228: n = A,T,C or G
tggactccaccgcggtggcggccgatgctactaacttttttattcttctttctgtttnnnnnnnnnnnnnnnnnnnnnnnnnnnnnnnnnnnnnnnnnnnnnnnnnnnnnnnnnnnnnnnnnnnnnnnnnnnnnnnnnnnnnnnnnnnnnnnnnnnnnnnnnnnnnnnnnnnnnnnnnnnnntggggaaaaaaaaaagatttaggggggggttaaggggggttttggnaaaattttaaaggtaaaaaaaatttttttttt

SEQ ID NO: 61461 - DNA, 438 bp, Homo sapiens
accatcatccaggctttgttgatccatttagagagcacaggcagagtagtttagcatcactctgaaagaccctagggttttcagaatggtaaatgagcacaggcttcaacttaaaagtcatcaactacatcagcccttcagaagagagtcagcctatcttttgaagctttgaaggcaggcattgacttttctctagttatgagagtcttagatggcatcttcttccaatataaagttgttctgtgaacccccgtctttactaaaaatacaaaattagttgagtgtggtggtgcacacctgtaattccagctactcgggaggctaaggcaggagaatcgcatgaacctgggaggcggaggttgcagtgagccaagattgcaccattgcactccagcctgggcaagaagagcgaaactctgtctcaaaaaaaaaaaaaaa

SEQ ID NO: 61462 - DNA, 285 bp, Homo sapiens
acttttttttttttttttttttaaaggccccggaaaaccccccctttttttttttaaaccttgggaaaattaaaggtccacttggagaaaaaaaaccctggcccaaattccttttttaaaacccccagggcccaaaggattttggggggaaatttttttaaaattccaaaaagaggtttgggaccttaggtttttttttggggaccccccccagggttccccaaaccccccccctttaggggaccaaagggttttttggggggaaaaatatttaaaatttcccaa

SEQ ID NO: 61463 - DNA, 292 bp, Homo sapiens
acttttttttttttttttttttttgaaaagagggatttccctttttgtcccaaggggggagggaaagggccaaattccaatctatggaaaatttttttccccagggaaaaaaaattttcccccccaaaaccccaaaaggggggggaaaaaggggtttgccccccccctccaaaaaatttttttttttttaaaaaaaaaggggtttttttatttgggccggggggggtaaaaaccccggccccggggggaacccccccccttaccccccaaaaggggggggataaccgggaaa

SEQ ID NO: 61464 - DNA, 293 bp, Homo sapiens
actttttttttttttttttttggggaaaaaaaaaggttttccctttttccccagggtggccttaaacttcggggctaaaaaaaactcccccccccttcctccaaaagggggggaaaaacgggggggaacccaaacccccggcccaattttttttcttttttttaaaacctgggggggtttaaaaaaaaaaccccccccccaaagtttttaaagggaattgttcctttttttaacaaatttaaaaaccggcccttattaattgccccccctaaaaaaaaaattcccttttttgg

SEQ ID NO: 61465 - DNA, 330 bp, Homo sapiens
gggactccacccggtggcggcgcgagtaccttcatcttgtctccagaatttattcttgattcataagtaggaggttatgaaggtagaaagttgtagatttttgaatatatgaaacaacaaggttactaaacagtttaaattctccaagcctaggagaatttctagttcctcgtcgtccactctttattaaaaatgaaaagtgaatttaccatctattggatgccagcactgtttgttattttttttctcccgttctgtttcaaaaactgtaatgcagtgaatttgggagggggaaaaaacgcatcttcaaaaactataaaatgtatttga

SEQ ID NO: 61466 - DNA, 130 bp, Homo sapiens
acttttttttttttttttttttttttttttgggttttgggggaaaaaaaaaggttttccctttttccccaggggggttttaaacctgggggtaaaaaaaaattccccccccttttttaaaaaaggggggg

SEQ ID NO: 61467 - DNA, 459 bp, Homo sapiens
cggtggcggccgaggtacttttttttttttttttttttgaaaaaaaagagggggtttattttttaacccagggtaggggccccaagggtaaatggaccctgaaaccccgggggtaaggaaaccccccccccccccccctcaaagggggggggaacaaaaaacccccctatggggccaaaaaaattttttctttttttggaaaaaaaaaaattttcccattttacccagggggggcccctcggggctaaaaaaaacccccttcccttttttttaaaagggggaaaaataaaaaaaaaacccaaaattccgggccctttttttttgggaaaggggcctttaaacaaataatttcgaaaaaacctccccccgaaaaaaaatttcctaagggcaaaaaaccttgaattaagggggttccccgcggggaaaattttttaacgggaaaaaaaaaaattttttttt

SEQ ID NO: 61468 - DNA, 130 bp, Homo sapiens
acttttttttttttttttttaaaattttcttaaaaaaacccttttaaaaaggaatttttttgaaaatcctttccccttttacctccctccaaaaaccacccggttaaaaaatttaacccaactttttttc

SEQ ID NO: 61469 - DNA, 278 bp, Homo sapiens
actttttttttttttttttttttttttaaaaaaaaaattttctttttcccccccgggggaaatggcggggccaaaattaaattaaaaaaaaccttggaaaccgggggtaaattccccgggccaaccccccgggggggggggaaaaaaggggatccccccccccccgggggggtttttttttttttcaaaaaaaaaggggggtcccccatatggggcgggggggttttaaattccccccccagggggaaccccctgcctgggcccccaaaggggggggg

SEQ ID NO: 61470 - DNA, 149 bp, Homo sapiens
tccaccgcggtggcggaccgcccgggcaggtactttttttttttttttttttgggaaagggggggatacactaaaacctttttctaattggggggcagtttaaaccccactttggggggaaaaatttttcctttttttcacaggttttt

SEQ ID NO: 61471 - DNA, 191 bp, Homo sapiens
actttttttttttttttttttttttttgggggagggggggtaaacccaaaaccctttttaaatgggggggttttttaagccccaaatggggggaaaaattttttccccttttaaaaagggtttttccaaaggcaaaaaaaactttttttttttggccaaaccttaaaattcccagggggttttaaaggggt

SEQ ID NO: 61472 - DNA, 213 bp, Homo sapiens
actttttttttttttttttttttttggggaagagaaaatcaaaatcttgggataaaaaagttttattatttatccaaaaaaaatccttaccttttataaattaaaagggaaaaaaaaatttcccttttttcccccccccaatcctatagtattaatttaaagggggttcaaaaaaaattttttttaaccatttttttttggccggttaaaaaa

SEQ ID NO: 61473 - DNA, 293 bp, Homo sapiens
ctccccgcggtggcggccgagtactcttttttagttttttttttttttttttaagaggcctaccttaactaaaagtttacttttggaaaccttgtaccttttaaaaaacttttaaagggttaacactttttgccaattttcctaaaccaaaaacctaaccttgggttcatgtttccaaggtttaattaaaaaaggggaaattaaaagggcggggaattaaaatggaattccatggccttccccttttaaccctttaaaaaaaatgaaccaaattttttttttggggaaaaccc

SEQ ID NO: 61474 - DNA, 214 bp, Homo sapiens
acttttttttttttttttttttttttttaaaaaaaaggggttttttttttaccccgggcccccgggtaaaattcagggggttgaatccgggctattttaacccccccccccggggtaaaaaaaaattccctggccaaaccccccgggcccccaaattttttggggtaccggcccccccccttgggccccagttccttttttaaggggccaaaaa

SEQ ID NO: 61475 - DNA, 333 bp, Homo sapiens
acttttttttttttttttttttttttttaagaggggccccctttccaaaaatttttttttgggaccccttttcccttttaaaaacttttaagggggtccccccttttggcaaatttccttatcccaaaaaccaacctttgggtttttttttcaagggccaaaaaaaaaaggggaaaaaaaaaaaccctaaaaaaaaagggggtttccgggcccccccctttttacccttttaaaaaaaaaaacccatttttttttttgggggaaaccccccccggcggaaaaaaaaaagcctgggttctattacccccttgggggctttgggggattaaaaaa

SEQ ID NO: 61476 - DNA, 454 bp, Homo sapiens
actttttttttttttttttttttttttaaaaaaaaaaaaaaccgggtttaaagggcctaaatttacccccccttccaaaaatggaaaataaaggggccaaaatttccaccgggggttttttccccccccagttttaaaagggttttttttaaaaaaaaaccttttttccccttccggggccctttaaaaaaggggggggtgcctactttaaaaaaattttttttttaaaaaaaaaccccccttgggaaaggggctttaaaaaaaaaaaggggggaaatttttcccaaaaaaaaaaatttggcaaattaggggccttaaaaaaaaaccctggggccctttttttgggaatggcccttttttttttggcttcctttgaaattaaccggccccccttcccaaaaaattttttccggtaagggggggggaataaacaaaaggaaaaatttttcccccc

SEQ ID NO: 61477 - DNA, 307 bp, Homo sapiens
tccaccgcggctggcggcgcgcccgggcaggtactgcagtggtgccatcatagctcactgcagcatctaacttctaggctcaagtgatcctcctgcctgtgccgcccaaagtgttggaattacaggcatgagccactgcttctagatggatgtcttttattggcgggggggaaagccctatatacgtatatatgtattttttactaattctaaaactgctaacccaagcaggacaaaatttaattgaataccaagaaaataaccatgccagattttcatgctaaatcagctaatactaacattgttt

SEQ ID NO: 61478 - DNA, 302 bp, Homo sapiens
actttttttttttttttttttttttttttaaaaaaaaaaaagagggcctttttttttgggttttgggggggggttttttttttaaaatttgggggaaaaaattgggggcccctaaaaaaaaaaaaacccccttttgggttaaagaaaaaaaggtttgtttttccggggcccccgggggggaatttttcccttttaaggggggggaaaattttaaactttttttttttccggccctcttttttacaaatcccacccgggtttaaaaaaagggggggaaaaatccaaacctttttttttttttt

SEQ ID NO: 61479 - DNA, 208 bp, Homo sapiens
actctgaggcttgtaggaaggggtaaaataggagacccagtaaaattgtaataagcagtgcttgaattatttggtttcggttggtttctattagactatggtgagcctcagtgattgatactcctggatgcgagtaatacgggattgtgtttaggaagtgggacctcctagggggatttaagccggggtgatgccctgttggggggcc

SEQ ID NO: 61480 - DNA, 368 bp, Homo sapiens
actttttttttttttttttttttacccagggaattaaaaaaaccttctttaaagaaaaaaattattttttaataaacctttttaatttttttccccaaaggcccttaaaccggattttttttttaataaatgggattttttttccccggggccccccggggttaaaaaaggagtttttggggcccttttttggttttggaaattttaaagggccctttttttttaaaaaaacaacgggggtgcctgacccaaaaatcgcaattgttttaaattttaaaaccaccaggggaaaaaggggggccaaaaattttaaaaaattccttgaaaaaggttttagggggaaaaaaaaatttcccctttaaaaaggg

SEQ ID NO: 61481 - DNA, 295 bp, Homo sapiens
acttttcttttttttttttttttttttggccccccgggggaaaaaacctgggcctcccccgggcccttttaaaaaaaaaaaaccaggggcgggaaaaggcccccttttgggccaaaaaaaaaaaaccccaaaaaagcccaaaaaccgggggtccccccaaaatccttgtgggggaaaaaaaccttctttttttttgggaaggggaaattttaaaaaaaaaaatgggggcccgggtttttttaccccccccccccccgaaaattttccccggaaaaaaaaaaaaaaccctttttcc

SEQ ID NO: 61482 - DNA, 189 bp, Homo sapiens
actggcatagttggttaaaagctttggttctgaagccagacagctaggtttaaatcctgactgctatttactaattttattaatttgggcttcttatttaaatccctgtctgactcattggctccttctgagataataacaatacctacattatagggttgttgcagtgattaactgagttatcacatg

SEQ ID NO: 61483 - DNA, 290 bp, Homo sapiens
acaaataaaattttttcttccaaatagctttccagtaatcctagaaatatttattcagaaaatgttttcagactgatttaaattccacctttattgcatagtaaattcttagagtagcagttctcaaagtgtattccatggaccctgggggttccttagaaattttcatgggttccgcaaggtcaaaattatttttatgataatactaaagtattgtttgaccttttcactgtcttgacatttgcactgatgggtgtcaaactgtggatgccttagcacaaatcaaggag

SEQ ID NO: 61484 - DNA, 300 bp, Homo sapiens
actttttttttttttttttttttttgggggggggatttttttttttcccccaggttggaatgaaagggcccggttttggtttattgaaacccccccccccaggggtaaaaaaatttttccccctaaaccctttaaaaagggggaaaaaaagggttcccccccccccccgggaaaatttttttttttttaaaaaaaaagggggtttaaacaatgggccgggggggtttaaaaccccgaacccaagggaaatcacccgcctgggcccccaaaagggggggaaataaagggggaacccccccc

SEQ ID NO: 61485 - DNA, 441 bp, Homo sapiens
actgcattaattaaaattgcatgtaaaagaaatcacatcataatcccacataaaacttgtagcaagtatttttacttctcaacaatacaatctacacttgcctactaatttacagttgggctactataatccaattacctttccaacaaggaatgtatttttaaacttaaattggatgacaccctaggaagttattccaaacaaaacaatgaagctgccatatacggaagacaatttagtagaagatgagatgcaatagtctctatactgactcttgcaaaacttgttcttgctaattgctgcatgatgtaaatagaaagatgatttttttaaacatgcaaaacatcagtctaggtatgtgacttctcttcaaacttccctgaagacaacagtgaactgacttcaatattatgactattcaaaatagaactgaaacaaggt

SEQ ID NO: 61486 - DNA, 286 bp, Homo sapiens
acatctttgataagtcccaacttaaatacataataaatggggatctagaaagaatgtaaaatatttaaataataaatacgtgaatcttataagataattactatttaccccgtaataaacttaaactcccagtggcctctggatttacctcaaaagctctgagtgtgagagcaatttcctcaagcaaatgtagatctttggaaaccaagacctttagcttgttccactttccttgcacatcatcaaattcttgcttatataatttttctacatcaggatgaacatt

SEQ ID NO: 61487 - DNA, 275 bp, Homo sapiens
acaaataaaatttttttcttccaaatagctttccagtaatcctagaatatttattcagaaaatgttttcagactgatttaaattccacctttattgcatagtaaattcttagagtagcagttctcaaagtgtattccatggaccctgggggttccttagaaattttcatgggttccgcaaggtcaaaattatttttatgataatactataagtattgttggaccttttgactgtgttgacattggcactggtgggtgacaaactgtggatgcctt

SEQ ID NO: 61488 - DNA, 280 bp, Homo sapiens
acttttttttttttttttttttttttttaagggcgtccctttcctaaaattttcctttgggaacccttgacccttttaaaaacactttaaaggggtgaccccttttggccaattgccctatcccaaaaaccaaaccttgggtccttttttccagggccaaaagaaaaaggggaaaaaaaaaaacccaaaaaagaaaggggatttcctggccctcccctttttacccttttaaaaaaaatgaaccaattttttttttgggggaaaccccccccggccaaag

SEQ ID NO: 61489 - DNA, 273 bp, Homo sapiens
actaatttttttttttttttttttggttttttaaaaaaaaagggattttccccgttttacccgggggggttaaattctctaaccctggaaacccccttttttaaccccccaaaaaggggttggatttaagggttgggccccccccccccgccaaaaaaaatctttttttttaacctttggggggtagaaccccaaatcttccaattagaaggggaaaggtaattggttggggttttttaaaaaaaaaaccttttttgtaaaaattgaaaggaa

SEQ ID NO: 61490 - DNA, 202 bp, Homo sapiens
actttttttttttttttttttttttgggggggggattccatttttaccccaaggtttgataaaaaagaacgggccttggtttcttggaaccccaaacctccagggtaaaaaaatttctctccctcaaccttttgaagtggggggaaccaagggtccccccccccccggggggtaatttttttttattgcaaaaaaaaggggg

SEQ ID NO: 61491 - DNA, 356 bp, Homo sapiens
  misc_feature 31: n = A,T,C or G
gcgcgtactcgtacttactatgaggcgaatnggactccacgcggctcggcggagcgagcagtttctataatcttgatatcgaattcctgcagcccgggggatccactatttctagagcggccgccaccgcggtggagctccagcttttgttccctttagtgagggttaattgcgcgcttggcgtaatcatggtcatagctgttgtcctgaaatttaaaaaatttttttaaccaaagtttgtttttttaaaaaaaaggtttaaaaaaaccttggtttttttttttttggccggtttggggcttcccagggataaaaaattttttaaaaaatttcttaaaaggggttttcaatttttt

SEQ ID NO: 61492 - DNA, 272 bp, Homo sapiens
  misc_feature 197: n = A,T,C or G
acctttttttttttggtttttttttttaggggagggaaaaattaaaacttttttcaaccattcaaaattggaaaaatttggcccccattaaccctgcttccaaaaaagggttaatttttccaaagggaaagggaaatttttgtgggccaaaacctcaatttcccttaaaaaagggaaaagtgttaaaaaaaaaatanaggggggaaaaataaaatttaccttttcctattttaaccaaaggggaaaggtttttttcgttaaatggggatccc

SEQ ID NO: 61493 - DNA, 290 bp, Homo sapiens
acttttttttttttttttttttttttttggttcccaaaggggttaaataaaaaaaaaaaccccttttttaaaaacccttaaaaatttttaacattttaaaaatcccccttaaaaagggttccccttttcaaaaaaaatttggaaagcaaaaacccctttttttaaaaaaattttaaaaggggttttaaaaaccccttttttccccctgggtccaaaaaaaaaaattttttaagggggggttttaaaaaaaaaaaaaccctttttaaaccgccgaaaaaaatttttttttt

SEQ ID NO: 61494 - DNA, 293 bp, Homo sapiens
acttagagagaaaaaaaagcaaattaaatcaaagagaaccaacaggatgaaagatttgctctattagacatcgaaactttataacatacagcaattcagacacatcttgttcttgaagatggatagtatgctggagtcaccctgcctcagcttctggctacgaagtctcccctgaactccgcatgaagatgggctttacaaatacaaactaaccaattcccaaacaaatactctatagggctgtcacactccaggccactgtgcttctgtcctaatcacgctagggccaaaaa

SEQ ID NO: 61495 - DNA, 320 bp, Homo sapiens
tccaccgcggtggcggccgaggacgcggggagttgaacgtttgtggagatttccgagttgaggaagtttgtgatcatctctgtgtttattgacccttttatagttttactagagcacatggatgaaaatactaatttcagaaactcaaaatcgaagcaaacgcttggagaaggtccatgtggttattgggcctaaatcgtgtgacttggattctctcatttctaccttcacatatgcttactttctagacaaggtcagtccaccaggggttctgtgtttaccagtgctgaacataccaagaactgaattcaactacttca

SEQ ID NO: 61496 - DNA, 368 bp, Homo sapiens
  misc_feature 25: n = A,T,C or G
gggatcgcgtcgttaatgcgtactnactcttgaggccgaattgggagctccaccgcggctggcggcgcgaggtacgcggggtcagatcagtggcagcattagattctcacaggagcacgaaccctattgtgaattgtgcatgcaagggatctaggttaaacgctcctcgtgatatagattcatcctgaagccatccacctatcccgtccgtggaaaaactgtcttccatgaaaccagtccctggtgccaaaaatgtcgggaaccgctgtattaaaaacatcttgggataataaaaatttaggacggcagaatcattgatttttttaaaaaattatatgacagttgataagcaattagttgaattcgaa

SEQ ID NO: 61497 - DNA, 252 bp, Homo sapiens
acttttttttttttttttttttttttaaaaataaaaaactttttttaattttttgggggggacccccaaagaattaaaaaaccttggaagggggtacccccctcccccccggaattgccccaggggaaaaaaggttccttggggggaaggaacccaaaaggggcccccttgaaaatttggggaaaaggaattcccttgggttttggaccctttgacccttacaggagaaaacccaaccttgggggaattgtt

SEQ ID NO: 61498 - DNA, 484 bp, Homo sapiens
actttttttttatttttttttttttttttttttttttaaaaaaaccccccccttttttttcccgggttgggggaaaaaaaaaaaaggggggttttttttttccccccggggggtttctcccctcaaaaaaagggttttttttttttaatgggggggggaaacccccccccttttttttgggaaaatttttaaaggggttttgggcccccccccctttttttcccccccctaaaggaaaaaattttttttttcccaaaaaatttttttcccccccccaaaattccccccccatgttttttttggggggggaaccccaatttcccccccctttttaaaacccccccaaacccttttttggggcccccttttttacccccttaaaaaagatttttttccccccccgggcccccccttctttttagaccccccccccaaaaaaaaaaaaagagtttaacccccccccccaaataaaaaataccccccc

SEQ ID NO: 61499 - DNA, 517 bp, Homo sapiens
acttttttttttttttttttttttttttttttttttaaaaacccctaaccctttggggccccccccctaaatttcccccggggattggaaaaccctttttaaaaaaaaacccccaggggggggggggccaaaaaaaaaaatttttttttttgtccccccttttaacccccccttccccccctttaaaaaatttaaaggggacccaccccccccctttttaaaaatttttaaaaaaacccccctgggtggggggaaaaaaccccttcttttttttttcccccaggggggcccaaaaatttaatttttttcccccccccccccccttttttttaaaccccccccccctttttttggcccccgggaaataaaaattttttgccccccaaaaaaaaatttttttttccggggggccccccccgccgaaaaggtttttttggggccccctcccccccccccccttttcggggggggttttttttttaaaaggggcccccctttatttccccccccccaaaaa

SEQ ID NO: 61500 - DNA, 234 bp, Homo sapiens
acttttttttttttttttttttttttttaagccccccccaaaaaattttttggccccccggggggaccttccccttaaagggtttttttttttttcccacccgggagaaaaaccccattttttaggttttttaaaaaaaaaaaaacccccaatttagcccccccccctttttttggaaaaggccaaaaaaaaatttttgggccccctttggcggaaggggccgggttattcccc

SEQ ID NO: 61501 - DNA, 151 bp, Homo sapiens
ctccccgcggtggcggccgaggtactttttttttttttttttttggggggaaaattttattttttccccccaggtggaaggccagggccaaattttgggttaatggaacccccccctttggggtaaaaaaaattttttggctaaacccccc

SEQ ID NO: 61502 - DNA, 390 bp, Homo sapiens
actttttttttttttttttcccttttaaagaaacccctttttttggcccaaaacctttcccggcaaaacccctgggtttccctccccagggttttaatgggttagccaccctaacttcccaaacttgaaaagggttaaaaaaagggttggggttgaacccagcccttggaattggaaaaaccaatttaaaaattggccccccaacaaaaattgttttaaaagccaaaagcccctttttttacccaaggggccctaaaaaaaaccctggccccctccttgaaaacccaaaacctccaaaactggggggggcctcccccctacggggggggggaaaaaaaaaaatttggaaatcgggaaaaacccgggcccaaagttcgggccctgcttttt

SEQ ID NO: 61503 - DNA, 407 bp, Homo sapiens
acattcaattcccagacattattcatcttataactagaagtttgtatgtctgaccagcctctcctcgtttccctcactccccagctcctgacaaccactgttctaccctttgtgaaacttagttcttgtcctttctagttttctcctgtggacagacatttgggttgtttttaggttttactattatgaataaaagtgctataaacattgtttgaaacattttttaattgtggaaaaaaaaaaaaaaaaaaaaaaaaggcccccgggcccttttaaaaataggggaccccccgggccgggggaatttaatttaaacttttttaaaccccccccccctgggggggggcccggccccccattttttttccttttaggggggggtaaatgccccctgggggaaaaaaggg

SEQ ID NO: 61504 - DNA, 309 bp, Homo sapiens
tccacccggtggcggccgaggtactttttttttttttttttgggaaaaaagggtttaaacattttccccagggtgggtcccaacttttggaccaaaacaattccccttccttgaccccccaaattggggggattaacgggaaaaacccccccccccggcccgggtttaattttaaaaacgggaattcccctttttccaaaaaacaaattgtggattaagggattttgggggccccttacagaaaaaaaaaccccctttttacccgggttttccttaccttggttttaaaaaacctcccgggtcttttaa

SEQ ID NO: 61505 - DNA, 283 bp, Homo sapiens
acactgaggcagtaggaggtgatggattctgcagttcttagagtgcaaactattcatattaataatagccaccatttcttggatgccctctgtgttgcaagcaccatgttagatgctttaaagatgttatctcatttaatcctttcaaccctgtgaggtggcaggtatcatttccctttagcagataagacaccagaggttagaaacttgtccgaggtcatacatttaagctgagattcaaatccactggtcctggctctcacctgttaggttgttgctctct

SEQ ID NO: 61506 - DNA, 557 bp, Homo sapiens
tccaccgcggtggcggccgagtactactgaattacccaaggcaaaatattccctattgtttctttgttttctaactttgttctctagcttctaggtagatgttaactttttggtatttaaatgtgcacactccctgagaccaaactgcctcagcaagttttacttcaatattaatgggcaagatgaatattgtttgatgtttcactgttagcaaaagggaggagaaagaactagaactaagttcaattgaaccattactatgcagggtctatacagtcatgattattatctcagattccaaattctgtttaccaaaaattatgattatcaaattgttaagatagtaaattttatgtgtatttttaccacaataaaaagttggaaaaaatgatttgactatatccaagtttgcagagttggtaagtagctttttattgcaaaaaacttgctgatttgtgaaagaaccttcatttccaaattaggattaatttcctgcaaggaaagactatgctgtgtgtgtgcctgtgtgctcttgtgtgtgtgtgtgtgtgtgtgtg

SEQ ID NO: 61507 - DNA, 438 bp, Homo sapiens
accttcacttggcattcaacaatataagaccattacataatttttacttcaaagtagatgggagtttttgttgaaagtcaaaaccctgtttctcttgctcctctttgaaagtctgttaacattttgagggttttgaatggtgatttgttcccagttggtagtgtgcctccattccctgttaataaaagactgatctgttcttgagccagatattagttgggtggcgaaaagtagctatctggagtcgcgggatgtaaaaacaaatatttcatggaaacgtctaaagaaggtaggatctttattttctttgaatctgatagatatttttggctgctgacctagggatgattctactctatcacatctgatactatgatacttactgagtagactcagattttgagtaatcataccttgactgtagttgtcatatactct

SEQ ID NO: 61508 - DNA, 421 bp, Homo sapiens
acacattttcagaattctttttaaaagtctagttaaagatgtttcttagaagttggagactgttaacaacttccataaaatagatccaggtttttcagttccctgaagcagcattcagtagcatctatataaataaaggcaccttctgagaataaaactattttatggagtgtgtgaacacacttgttctgtcacctgggttcatcttgttgtgaagcacattaggtccaggtccttccctctgggagtctgactgtgaaactctttaacccaacaactcaattagcccctgtagataagacatgcttcccagagtgagatttttgaaatccccttttcatccagaactatatttacccacctattgtaactattcagatagagcaaaattaggaggcttgataaatactaagaatttagt

SEQ ID NO: 61509 - DNA, 307 bp, Homo sapiens
acttttttttttttttttttttttttttcgaaaaaaaaaggttttttttttttcccccgggtttttttaaaccccgggcccaaatttttttttttccccccccccccaaaaggggggggattaaaaaaaaaaccctttgcccccccccctgaatttttttttttaaaaaaaaaaaaaaggggggtcaaccttaagggcccccaaaaaaaagcccttttttttttaaaacggttttttaaaaaaaatatttttttttcccccccccaaaaaccccaaatttttccccaaagggaaacctaaaaaattc

SEQ ID NO: 61510 - DNA, 518 bp, Homo sapiens
tccaccgcggtggcggccgcaggacgctgaagcttgcccttggcactctgaagattaagttagtccagcatggagattactacctctccttcacaatctgccatatgttaggcatctccccaatttcctaagacctcctggactgggaacaaaatgagcgtagtgcaagtagaagcacctttaaagatagctccacgggacacaataaccaataaaaactcacgaaactcaaacgaaaaagtgctggctgctgtatacaaggctctagaatgaccaccaaatatacctggctggcaccttgctaaaacccaacatggccaccccaggccatgcttgcactcagaagttttctcatgaggagattggggtggggaccgtcacagcgcttttccgcacattgcccgggggtgtcactgggatcaccttcctgtctggaggccagagtgaggaggaggcgtccatcaacctcaatgccattaacaagtgccccctgctgaagccctgggccctgaccttct

SEQ ID NO: 61511 - DNA, 520 bp, Homo sapiens
acgcgggtaagtgaggctgtcaagttgtttgcttagcttcacaagcacgtggtcagccaaggaagtaagtgctttttaagaacagtctttagtatagcatgtttaactgttttactatgcctaaagttacagattggttttacgaaccttgtaaagaattatttagtgttgcaattattagtctttttaggcagtaacatcccagaaaatgtctaatgggcatatcttaagcttattggaattaatctcaaatacaatgttgaatagactcagtccagttttcttcaagtatcatatttcagaaacctgaggcctgtctggtgaggagcagtcagcctcatcaaggaggaagtcccatcagcggaggcttgcctttctgtttgaaataacattgtggcatatttttatacagttttcttgaatattgaagttggctgaattatttgttgtagtctgatttccattctggcttttaaacttgtatattttgtggaacagtaagactcacttacaagaagta

SEQ ID NO: 61512 - DNA, 331 bp, Homo sapiens
  misc_feature 17: n = A,T,C or G
tccaccgcggtggcggnccgaggtacttttttttttttttttttttttggggggttcccccaaaaaaaaattttttttttttcgggggtttttttaaaaacccaatttaaggcctggagaccaccctccccggtttaaaccccaaaagggaaagcccttttaaattttcctaaaacaggaattttcggggaggggttttccccctattcctttttaaaaggaaccaaaatttttttcttaaaaatttttttttgaaaaaaaaattttccttttgccccccgggggggataccggggcccctttttaaccccctggcccccccccctttggg

SEQ ID NO: 61513 - DNA, 444 bp, Homo sapiens
actttttttttttttttttttggggggggccccggcgccccaaaaccatttaaaaaaaaaaccggcaagttttaaaaatgaacttttttttgggccccttttttaaaaaaagggcccccttttaaagggccccctttccaaaggaaaaaaaaattcaagggccaaaaaaaccccttgaaccaaaacttttttaaaaccggtttttgggcaggggtttaaaactggaaaacccttggggggccaaacttatttttttcccaagggtcccaagttccgggggatgcccattttccgcccttttggtaaaaacttggggctccttcccccaaaaaaaaaagggcctaaaggggggggttttaagggtttttggcttaacccaaaaccagaattttgtttttggcccgctcttaaaaaaaacctcttgtaaaacagggtttttttccc

SEQ ID NO: 61514 - DNA, 303 bp, Homo sapiens
cgtacttataccggccactgctggatttggctatactctggctttattcgttccaccgctaggagagcgtcctatcgcctgccttggacttcctatatggagctgggggtgctcactatatctcctacatagagcatctgtgctatcctgacctttgaggttctccgaaaagtaggaaagaatcatgacttctcagctggtctcatcattggtggaaaggatctaaaacacgaagctgagaggatcaacaacataaatatactcgcgtgcacaccaggtcggcttcttcaacacatggatgaa

SEQ ID NO: 61515 - DNA, 295 bp, Homo sapiens
actttttttttttttttttttttttttttggcaaaaaaccccccaaaaatttttaaaaaacccaaaaaaaaattaattttcccccaggggccctttttacccctttttttttttggcccccaaatttttttttttttttttaaaaagggggggggggaaccccttttcctggaaaaaaaaaaaacaaggggtgggcccccccccaaaaaaaaaaaattggaaaaaatgagggggaaaactttgcccaatgggcttttttccggaaaacccctaaaaaaaaacggggggccttttt

SEQ ID NO: 61516 - DNA, 294 bp, Homo sapiens
acttttttttttttttttttttgcaaactgggggataaaatttttttgggggggggcccttcaaaaaaaacctctggggggacccccttcctttgaggttttatatggcgggccccgggtttatctttttgggggttttttcggggcccttttttctgtccaaattccgggggggtaatttcccggggccatccccccaaaagggggtcccttttgggggggggcttttaaccctttaaacgggccccttaatttgggaaacctcccaccaaagggtttttttttttttttttt

SEQ ID NO: 61517 - DNA, 462 bp, Homo sapiens
tactttttttttctttttttttttttgaaaacagggcctaattatggggtcccacttgatcggaaggctaaggcggaaagataccttgaccccggaaaataaaggctgcccttagctataatcgccccatcacactttaacctgggtaacaaaataaaaccctgtctaaaaaaaaaaaaaaaaaaatttaaagtcaaaatccttttttaaaaaatttttaacccttttttgaaaaaaccaaaaaaaaggggaaaaagtttttttaaaaacccttgaaacctaacccgggcacaatacccttccaaaattggaaatccaaaaaatttttttttttgaaaccaaaccccttaaaaaattgttttgaaaataccttaaaaaacctgttttttaattcacaccaaaaacgtaaaaaaaaattttcccaaaacccattcctggtgttggaaaaaaaaaaaaaaaaaa

SEQ ID NO: 61518 - DNA, 133 bp, Homo sapiens
tccaccgcggtggcggcctgagtacttttttttttttttacccaatatttggaggaaacaccaattgattttgtatacccaaattgaaacattttcaccaaatctgtaaccattttgtttgtttagttggggt

SEQ ID NO: 61519 - DNA, 513 bp, Homo sapiens
  misc_feature 460, 469, 490, 497: n = A,T,C or G
acgcgggtaatatatttttagatatatctatatttatacctacacctgccctctctatacatagatatatatgtagactataaagaaaagcacagggattatgaacataaccttcagaagagtggtcacctctgtgatgaagcaaggggactggatcagagaagaaattccagcagtcctgtagcttccacaggactagaaatatttcattctgcatgaagtgatgggtgtatggatgttatttaattgttatgcttcataacttagattcacatcccactttgagaatatctcctatagaaacaaaggacttgtatttaagaatgtgtaagaagagtcaccacggagctgacatggaggctggtggcacctgggcgcaacgccgtatgccaactagcctaccgcgtggatcacggagctcactgacgagaatgtcaagttcatcatatatatatatgtnagatgtgancttaatattttcaatggaganacacaanaaaaaaaaaaaaaaaa

SEQ ID NO: 61520 - DNA, 254 bp, Homo sapiens
actttttttttttttttttttttggcttcttttttttttttcccctgtaattttttttgggggggggggtggaattaaaattttttttaaaaccccccaaaattaaaaaccttgtttttttaaaaaaggcccaaaaaaaattggcccccccaacaaaaaaaaaggttcacccccccccctttaaaattttggaaaattttaaattttttaaaattttaaaattaaagccaaaaaatttttaaaccccccccccc

SEQ ID NO: 61521 - DNA, 212 bp, Homo sapiens
actttttttttttttttttttttttccaacctggaaaaaaaaccctttttttattgttgggaaaatccttaggggggggctttttttttttcccctcctccttaaaacccttttggcccgggggaaacaataaaaaaaggggccctttaaattttaaagggaaaatttttgggcttttttgccccccccctcaaaggggttttaaattgatt

SEQ ID NO: 61522 - DNA, 285 bp, Homo sapiens
acgcggggatcttttgcccgccaccatgtaagatatgcctttactcctccttcaccttccaccatgattgagaggcctccccagccatgtggaactgtgagttcattaaacctctttcctttataaatacccagtttgggtatgtccttacagcagcctgagaatggactaatagacacctattgaagagacgattctttcctcactgtgtgtcttgacactctggtcaaaagttagttgagcacagattgatttattcctaggctctctgtaatgttccattgg

SEQ ID NO: 61523 - DNA, 294 bp, Homo sapiens
actttttttttttttttttccaagttggggcctgggaaccaaagaaaattggaccctgtttttttttaaggagggggtttggagggccccaacaaaattttttaaaatcttgcaaaaaacttttttaaaagtggtggaaaaaggctttttgttttaaaaaggtggagtatttttcgaaaaaaatttgggggccctttaaaactttccttaaataaactttatttgtaaaaaaatgggggaatggattttgggttgggttgggggggaggaaaaaggactcctggggggcccttt

SEQ ID NO: 61524 - DNA, 300 bp, Homo sapiens
accccataaatacagttattatttgtccattttgaaaataaattttacaaatccacaaatcaaatcatgggctatgatctgagtgtttacattcccccaaaattcatatgttgagatcctaatccccaaggtgttagtatcaagaggtggagtctttggagaggcaattagttcacgagggctgggccttcaggaatggtatcagtgctcttataaaagcgaccccagagagacagccctacccttccgccatgtgaggacacatctagaaagttccagctaagaaccagaaagcaggcc

SEQ ID NO: 61525 - DNA, 300 bp, Homo sapiens
acgcggggcagcctaataacgtgtgggcttgggattcagttcttgaaacaaaactctgagccttcaatgacctttcggtctatgtaaaagcactcctgtcttcctggcagcagttggacctcacaatgtggattgtgccctcacccagcaatgtttatgccctatcgccatggtgacggaattaggggtctcctgctcttcgtcctaaggaccactgtctgtgctgtgtctttcaaaggtcagaagagattgaacctttgtgtttttattttccctgtgtttgctttttctcatggggaa

SEQ ID NO: 61526 - DNA, 426 bp, Homo sapiens
acgcggggggtgggaacatgtaacttgtagactggagaagataggcatttgagtggctgagagggcttttgggtgggaatgcaaaaattctctgctaagactttttcaggtgaacataacagacttggccaagctagcatcttagcggaagctgatctccaatgctcttcagtagggtcatgaaggtttttcttttcctgagaaaacaacacgtattgttttctcaggttttgctttttggcctttttctagcttaaaaaaaaaaaaaaaaaaaaaaaaaaggtccctggcccctttaaaaataaggggtcccccggggcgggggaatttaaaattaaaccttttaaacccccccaacctggggggggggcccggaccccatttttttttccttttggggggggtaaatggccccctggggaaaaa

SEQ ID NO: 61527 - DNA, 191 bp, Homo sapiens
actttttttttttttttttttttttttccccaaaaaaaaacttttttttttttttttaaaaaaaattccccccttgggggaaaaaatttttttggtaaaacccaaaattttttttttcccctccaaaaaatttcttttttcaaaaaccttgtaccccccctctttttccccccccctttttggggttaaaa

SEQ ID NO: 61528 - DNA, 220 bp, Homo sapiens
actttttttttttttttttttttttaaacggaatttgctttttaaaccccggcgggagaggaaggaaaaattttagactgatgaaacccaccacgtcgaaatgaaagagatttttttgcctcacgccccacggggccgggacatttgagaacccccccacgatcccgaacattttttgatatgtggagaaaaaagggggaccaaaaattgggccagggag

SEQ ID NO: 61529 - DNA, 299 bp, Homo sapiens
actttttttttttttttttttcccctgggggtaaaacccgggtcaaccagtggctgaaaaaagtaacctaaatggttgggggcctggccatttccaaaaagttttttgtttaagcctgcctttgcctttgtttgaatctttgcctttttttgtcaacggaaaggggggctcctttctctaaaacccggaaaaacacttttaaaaccctccccaggtttgttgggtcaaaccccaagtgccgggatcaaaaccggcccccattttccttttaaggggccgccctcaaagtgcccggtggg

SEQ ID NO: 61530 - DNA, 299 bp, Homo sapiens
acttttttttttttttttttttttttttccttttggccaaaaaaaaaaatttaaaagggggtttaaaggggttttggggccaatttaaaagtaaaaaaaaatttttttttggaaaacccattttcccccgggcggggggggttgccccccccccccaaaaaattccccccttttttcccaaaaaaaagggggggcctttttaacctttttaaaagaaccccctggggttgggggggttaaaatttgggtcccccccaaaaagttttttttagaaaatcttttccccaaaggggtggggg

SEQ ID NO: 61531 - DNA, 298 bp, Homo sapiens
acttttttttttttttttttttttttttccccccaacccggggagaattccctttgggcccggaaaacaaattttggggggggaaaactttccgaaaaaggaatttttccgggacccccccttttgggccaaaaagggcccgggaaaagggccccccgggcccctttttgggggggaaccgggctttccttttaaggggggggcccaaaaacccctttttttttaaggggggggaggatccccccctttttaaaaaaaaagggttttttttttttttccccgggggaacccccccttt

SEQ ID NO: 61532 - DNA, 299 bp, Homo sapiens
acttttttttttttttttttttgaaccccccccctggggaaaacccccctccttttgaaaaacatttcccaaaaacctttaaaaaccccaaaaacttttttaaaaccccttttttggggattcgggggggaatttccccccccccccaaagggtgggttttttttaaatccaagggtttttttgaaaaaaaatttttttttttaaagggccgcccaaaaggcaaagggtttttgggggggccttttttaaaaaggtccccttccccaaaatttaaaggctttaggggaaaaaaaaactt

SEQ ID NO: 61533 - DNA, 285 bp, Homo sapiens
actttccagcctccagccaatggaaagtccttaaaatccttcaccaaatatacctcaaaacaataaattccatgccccctcatggaattccaggcccctgtatgatgtttgctaaaagtagtggcctacaaatctgtaggtgaacaggagatgtctggactgacagcccttgatgcaaggattatctgagatattgaccagggtatattatgtccctaattttttgaaagtccatttgtcaggtggccccttctcattcaacaaaaatcatataatcatctcaat

SEQ ID NO: 61534 - DNA, 414 bp, Homo sapiens
actttttttttttttttttttttttttttttttaaaaattggggaaaaagggggaaaaaaaccccggggggttttgggttttaaggccccctccccaaagaggggttttccctttggggttttcccccaaaaattgccccaaaattcccccaccctggggggccttttttttttaaaacccttaaaaaaaattgggggttttttttaaagggcctttaaaaaaaccccccctttttgggggaggttccttccttggggcccccccatttccccccaaaaaaaaaaacaggtccccctttttttttttcccccaaaaaaaaaaaaaaccaacccttccccccgggggccccctccccaaaagggccaaaaaaaaagggccccttgggccaaaaaaaaataaaatccccccccccc

SEQ ID NO: 61535 - DNA, 277 bp, Homo sapiens
actcatctctacatagggactgatcttacacaaagaatagaggctgagaaagcactcttggaacttattgacagtccagaatgtctcagcaagtgtcaacttttattagaacaaggaacaacatcctatgctcagctccttgcagcaacatgtctttcaaaacttgtcagccgagtcagtcctttacctgttgagcagaggatggacatcagagactacattctgaattacgtggcatcacagccccagctgggctcctttgtcatccaagctctta

SEQ ID NO: 61536 - DNA, 279 bp, Homo sapiens
acttttttttttttttttttttttttccttttgggaaaagaggggttccatttttcccccccgggtgggggggaggggccaaaccttggtttattgaaaccccccccccccggggtaaaaaaattttcccccccctacccccaaaaattttggggattaaagggtttcccaattttccccaattaatttttgaaatttaaaaaaaaaggggttttcctttaaggaaaaggggggttttcccagggtggtcccaaactcttaaccttaggggaacccccc

SEQ ID NO: 61537 - DNA, 289 bp, Homo sapiens
actttttttttttttttttttttttttttcccttttgaaaaccccccccccataaaaagatttttttcccccaacccaagggtttggaaaaagccccttttttaaaaggggggaaaggacccccggaattttctgggggtttgggaaaaaaacctttttttttttaaaaaaaaaaactttggggaacccaaaaaaaaaaaaaaaaattttttaaaaaaaaaaaaaaaaaattttttgggggaggggcaaaaacgggggggcccccaagggcaatttgttttccccccgg

SEQ ID NO: 61538 - DNA, 135 bp, Homo sapiens
ctccaccgcggtggcggccgacgtcttgggtcttccagttttgcattcaaacttctatacgtctccaaattgtttcatcctaccactcccaattaatctttccatgtttcgggtgcgtctagtaaatgcgttaac

SEQ ID NO: 61539 - DNA, 456 bp, Homo sapiens
ctccacccggtggcggccgcagtactttttttttttttttttttttttgggcccccccaaaaatttgggcaaacctgggtttttaaaaaaggaaaagggggcccccccttttttttgaaaagggggtaaaaataaaaaattttttttaaaaaaaaatggggggaaatttcctgctaccgggggaaggggattacttttttttccaggccccaaaaacaaaaatttttggggttcccaggatttaaaaaaaaattctggggccccttagggaagtaaaaagccccccaaagccggggggtctttttgcccccccccaaaaccccaagcccaggggggttttcctaaaaccccacccggccaagttttttttggggttaccccggaaaaaaacccccccctccacccccattaaaaaaccccttttttggggaaagaaaaaccccaaaaaaatcgggg

SEQ ID NO: 61540 - DNA, 165 bp, Homo sapiens
acttttttttttttttttttttttgaaaaaaaaaggttttttttttttccccagggtttttttaaaccccgggcccaaactggtttttttcccccacccccccaaaggggggggattaaaaaaataaccctttgcccccctttctggatttttttttttaaaaaa

SEQ ID NO: 61541 - DNA, 300 bp, Homo sapiens
actttttttttttttttttttttttttttttttttttttaaaaaaattttttaaaaagggggtaaaaggggcctttaaccccggtaaattttaaaaaaaaaatttggggggaaggggaaattttttcttttttaaaaaaaaaaaatttcccccaagaaaaaaggggaattttgaaaaacccccccttttttttttttcagcccccttttttccccccccccccaaaaaattttttttttttaaccgggggccccctttttttttaaaaaggggaattttttcccccccaaaaaacccccc

SEQ ID NO: 61542 - DNA, 261 bp, Homo sapiens
cctaccatgtgagaaatccctaaattgtgtcttacacacctgctgaaagagaaggaaagcctatgggagcaggacatcgaggccatcctgattagaggaccaggactggtaaagaggatctcttactaatgaattagaaaagcagcagcagagaggaaatcatgaagaaaaagtgtaataggactagagatgttagtagacaaggagcagaaagggcatcaaaatgatcctcagtattttcatgttgagacacattcattc

SEQ ID NO: 61543 - DNA, 267 bp, Homo sapiens
atttcatcaatgcattcaattgctccttgctgttctttttctcccttcctcagcaagcctgcagaggccaatgtctcctccggtcccagagcaggaggcattcttggtttcttcttttgaggcaggagtggagactggcatttgggggccatgctgctagggaagtccaagaaccagaccacaagtctccttgctcatccggaagcaggcagaacactctggtataagatttattggttaaaattgagcaataacacatgggtattt

SEQ ID NO: 61544 - DNA, 451 bp, Homo sapiens
acttttttttttttttttttttttaaaaaagagggggcccccttttttccccagggttggttaaaaccccggggccaaaaggaaccccccaccttggccccccaaaggggggggattaaagggataaacccttggccccccccggggtttttttaaacccctaactttaagcccttttttttttgaagggccccctttgggctaaacccccccctgggggaccgccccaaatttggccccccggggaaagcccctttttaaatttccaaaggccccccccaggggccccctgaaaagggggggggcctggcctgcccctggcccttgccccctaatgccccggccccaaatatccttaccaaaattttggggaaaccccccccttttaaaaaattttttaaagattgcccttttcctttttaaaaccaaaaacaaaaggggaaaatttccc

SEQ ID NO: 61545 - DNA, 414 bp, Homo sapiens
acttttttttttttttttttgggggaggggggggtaaacctaaacccttttttaaagggggggcttttttaagcccaactaggggggaaaaatttttacctttttaaaaagggtttttcctaagggccaaaaaacttttcctttttggaacaaacattaaatttaacaggggatttaaagggtttttggggccaatttaaaggtaaaccaaaaattttttttggaaaacccatttttccccagcctgggagggttgcccccctcacctaaaaaatctccccattttttgccaaaaaaaagggggggcctttttaaccttttttaaggaacccccttgggttcggggggtttaactttggtttccctttcaaaagttttttttgttaatttttttatccaaagggtaagggggaa

SEQ ID NO: 61546 - DNA, 371 bp, Homo sapiens
tccaccgcggtggcggcccgagtactttttttttttttttttttttttttgggggccccctttaaaaaaattttttttggaaacccttggcccttttaaaaaattttaaaggggggcccctttttgggaaattttcttaaccaaaaaaaccaactttgggtttttttttcccgggccaaaaaaaaaagggggaaaaaaaaaaccccaaaaaaaaagggggtttccggggccccccctttttaaccttttaaaaaaaaaaaaaaaattttttttttgggggaaaacccccccccccaaaaaaaaaagggtttggttttttttaacccttggggcccttagggggtttaaaaaaaaccccaaccggcccaaaa

SEQ ID NO: 61547 - DNA, 122 bp, Homo sapiens
tccaccgcggtggcggccagagtacttgttttttttttttttttttttttataagggggagggtgtaaatctaaacccctttttaaatgagggggctcttttcaccccttaagggggggaaa

SEQ ID NO: 61548 - DNA, 466 bp, Homo sapiens
actttaggctgagaaataaatagaagggtgagaaaaaagaacagtctttatagtcagtaagagtgaaaagagaaagatggtagttggggaaagacagatggggagaaaggttggctggttgttaataaaacagtagaggatgagcatgtattataaatgctggtgggaagaaaccttgtggcaaggagggtggtagtgttggagaagaaagagaggatatagtagaaagttaaagaggaactggaagcaggtgggatccaggacataggaaggggaagagccttgggcagaggtgagacatctgcaggagggaaggaactgagagaagggaaggtgtgcaaatgtggcaggaggagtttgagtaaagttccatctgatatcctctattttctctgtaaatcattctgaatgaagtatgagacaaagagatcaaaggctaaaaaaaaaaaaaaaaaaaaaaaaaaaa

SEQ ID NO: 61549 - DNA, 314 bp, Homo sapiens; identical to SEQ ID NO: 39661
  misc_feature 194, 195: n = A,T,C or G

SEQ ID NO: 61550 - DNA, 278 bp, Homo sapiens
acttttttttgtttttttttttttctttaaaggcgtacctttcctaaaattttaccttgggaacccttgtaccttctaaaaaactttaaaagggttgacacctttggccaaattgcctaatccaaaaaactaaccttgggtccatgtttccaatgtctaaataaaaaatggaaaaataaaaaacctaaaaatgaaaggggattccttgtccttccccttttaacctcttataataaatggaccaaatttgatttttggggaaaaccccctcagccaaa

SEQ ID NO: 61551 - DNA, 201 bp, Homo sapiens
tccaccgccggtggcggcgcgcccgggcaggtactttcttttttttttttttttgttttcaaaaaaaaaaatttttccttttacccccggggcctttttaaagcggggctaaaaggaacccccaccgcggggccttttaaaggggggaaaaacaggggggaccccccctcctgtttgaaaaaattttttttaaaggaaaaa

SEQ ID NO: 61552 - DNA, 144 bp, Homo sapiens
cgcggtggccgagcggccgcctggcaggtactttttttttaaaattcttttttttttttccaaaaaaggggtttttttttttccccccggggggggggggggggggccaattaaattggcccaaaccttttccttggggggaaa

SEQ ID NO: 61553 - DNA, 223 bp, Homo sapiens
cggtggcggccgaggtactttttttttttttttttttgaaaatatttttatttaaaaggggaatttggttggaattcccttgtaaggcccaataatttggggaaaaattgggttgtttttttttttcccaccccccctttttttttcccctttttaaatttggggaatttttttatttggggggaattaattcccccttcgttaaaattggggttaaaggggg

SEQ ID NO: 61554 - DNA, 333 bp, Homo sapiens
attgggaactccaccgcggtggcggccgcagtactttcagcacaccgtggacaggggaggaatgggttctgcttgctgaccgccaacttctgatgctgatgcgatatgtaccctttgacgtgtcccatgtatatcaagttagccagaatacactgaacttcgtcaatgtccacgtcctccacctgcatgaacttcaaggcgaaccatgaaaagcatccagagacagctggtgtgttttcaggaacaaatacctggaagaggggaggagaagggcactgtggttaccgacaggatgcaatactccacagccaagaaaaggcacctcttaataag

SEQ ID NO: 61555 - DNA, 197 bp, Homo sapiens
acttttttttttttttttttttttaaaaaaaaaattttatttttttccccaggggggggcaaaatttttgcccaatggaaccccccccttggggggccaaaggatttttattaaagggcccaaaccccccaaagaagggggaataaaaaaacccccccccattccaaaaaaaaggttgttttttaaaaaaaaaaggg

SEQ ID NO: 61556 - DNA, 346 bp, Homo sapiens
  misc_feature 278: n = A,T,C or G
acatgtgaatagagccaggtgtaaggcatggcattagggagtgctaggattggagattgaggtgtccatgttctgtcttaatgtattcagattcagttaaaaagaccaccacaatttgtggcaaacaaatcaggaatgccgttgagtcactagtttgcaacctcaggtataaaaactagtgtatgaaaaattatggcatagctccatatttatagtgaaatttatagtgaaatggacaaaaatgctaaaagtccatcatgcttctatatgtgaactgngatatagttggtcaatcattggaaaatatttttactataatgtttaaggaactgtgtgagaagttatg

SEQ ID NO: 61557 - DNA, 304 bp, Homo sapiens
acaaaatagcaatcaagcagcatcgttctcataccctagatctgaagatagaaatgaagaaatgaattccctgaatatatatgtatttatttatgtgtgtgtgtgtgtgtttagcatcaacacttggcacttagtatgtggcctgaactgttctaaaggcttttgtatggtaagtcatttaataaggtattttaattttcagtgatagtaaatggcctagcccatggctaagagcttgttcctgatctttgtattacgtggaagtgggttcaaatcttgtttctgtcgcttacaaatggcatga

SEQ ID NO: 61558 - DNA, 336 bp, Homo sapiens
tccaccgcggtggcggcgcgaggtaccactgcactccaggccaggctacagagcaagaccctgtcttaattttttaaaaataacaaatagactagctagctgtgtatgcccttaaattcatcctaacggtaaatataaacccttgtatcctgaagtagatgtcatccaaggtcatgttttcataatccaggtaatctaaagtagtagttctcaagctgtggtgccaagatcaagagcagcatctgaaacttgttagaagaaatacaaattctcaagccccatgctaaatcttctcaatcaggcacttgaggttgtggcccagcaaatctgtgtttt

SEQ ID NO: 61559 - DNA, 185 bp, Homo sapiens
acgcgggatcttttaattccacatacatatatatcttaaggaaataactagaaatgcaaacaagaatttgtattcagaaatgttcactatagcatcacatagggtaatcaaaaaattaaaaataacctacatgctctcaaagtaggaggaatggttaaattatagttgaatttgctttgtctctc

SEQ ID NO: 61560 - DNA, 193 bp, Homo sapiens
acttttttttttttttttttttaacccaaggttccattttgatccaaaaggtggagagcaccccttaatttttggtaaattaaaacctaaaccttgggggttaaaggaaaccccccacctaacccctctataatggtggaaaaaagggggccccccaaaaccccttactatttttttttttttttaaaaaaaa

SEQ ID NO: 61561 - DNA, 290 bp, Homo sapiens
actttttttttttttttttttttttttaaaaaaaagggatttcccccccccccccggggggggggggggggcaaaaaaaaaacctttttttttttcccaaactgggggattaaaggccccccccccccaaaccctttaaaaaagggggaaccagggggcccccccgtttcccccccgggggggggggttaaaaaataggggcccccccggcccgaaaaatttttttttaaattttataaaccccccccccccgggggggggcccccgccccccttttttttccctttttg

SEQ ID NO: 61562 - DNA, 127 bp, Homo sapiens
acttttttttttttttttttttttttaaaggggaaaaaagggttttttttaaaaaacccaccccaagggttttggagaattttcctaagccttgggggcaagggttaaagcttttggaaagttttta

SEQ ID NO: 61563 - DNA, 165 bp, Homo sapiens
actttttttttttttttttttttttttcccaccccgggggccccttgcccaatttttccccggggaattttggggaattttgggggtgggaaataaaaccctttccccccccccaccttttttttttggaaaaaaaaattttttaaaaactcccccccccccccc

SEQ ID NO: 61564 - DNA, 294 bp, Homo sapiens
tgcggcagccgccaatgatgcgaccacacttaacctccaaaagcgcctggattacaggcatgaaccaccacagttttattttcagggtatcccaaaaatgtggtgacaaagtcagataactgcattctctgaaagggcaactgatatgacaacatagaacagatgaagtcagccttaatgaagaggagatgattagattataagtcaaatgacccaaactcaggtctttatttcaccacccgcgtactagtcagtatgctgtagtattaatcagtacgtcaagttcagtgaagt

SEQ ID NO: 61565 - DNA, 459 bp, Homo sapiens
cccgcggtggcggccgaggtactttttttttttttttttttccggggggagaatttttttccccccccccaaaaaaaaaccttttcacttgtttgcccccaaagaaggggggaaaaacccaaaaaagggggtgtccctttttaaaactttttttttattttgggcttttgcccccttttttttttttttccttgggcccctattaaaattttccaaattccccccaatttttaaaaaaaattcattaaaggttttttaaaaggggttcaaaggggaacttttaaaaaacccttttcccccctttccctaaaaaggggaagggtttcccggccccaaaaaaaaaattggccagggaaaaaaaaaatttttttgggggaaaaaaaccccccacctttttttggtcttcccttttttttcccccctccccccccaatttgaaaaaaaaatttcgggaattcc

SEQ ID NO: 61566 - DNA, 303 bp, Homo sapiens
acgcgggatctcaaaaaaaaaaaattaaaattaaataataaaaaataagcaacaacatactttttttgtgagtataaacgtttaggtttactaacaaaagttgcatgagtttagcatttatgatcagacgaaccattttcataaagaaataggtcaaagagggaaatgtataaacacatttcactatagtgggtaattgggtgccatcagctttataattggggttatctgaaataccatgatgaacaacctaagtcttttgacaagatggagcaaaaactacaatgggttaccactgggggt

SEQ ID NO: 61567 - DNA, 406 bp, Homo sapiens
acattcaattcccagacattattcatcttataactagaagtttgtatgtctgaccagcctctcctcgtttccctcactccccagctcctgacaaccactgttctaccctttgtgaaacttagttcttgtcctttctagttttctcctgtggacagacatttgggttgtttttaggttttactattatgaataaaagtgctataaacattgtttgaaacattttttaattgtggaaaaaaaaaaaaaaaaaaaaaaaaagcccccgggccctttaaaaaaaaggggacccccgggggcgggggaatttaatttaaacttttttaaaccccgccccccggggggggggcccggccccccttttttttcccttttagggggggtaaatggccccccggggaaaaaaagg

SEQ ID NO: 61568 - DNA, 296 bp, Homo sapiens
actttttttttttttttttttggggccaatgggggtttaaaattggaaaaaaagagaggtttttttgggcaaatttccccccagaaaaaggcctaaaaattttttttttttttttaaaaaaaaaaaaaactttttccttggggcccttaacccccccaaaaggggggggggaaccccaaactttttttttacttaacccaaaattgggctttttaaaaaaaaaaagggggccccaaaggggctttttttttggggccaattgggccatttttgcccccactttttaaacaaaaaaa

SEQ ID NO: 61569 - DNA, 365 bp, Homo sapiens
actcagcctactttgagttcttatcgtgagcacaacatgtattatactgagtgaggtttttaaaggacaggttccccttctcccaatcatattctaacctgttaacctagccagatcacttgtctccatgggaggccgtatattccctaactctggaagagatagcttgtgttggaatcctggttccaccacttcctagtttcagcaatgttcctcatttctctaagcttcaacaacgttatatgaaaaaagcaggtagtgataatacctacttcacagaggtgaggtaaggattgagttaatctatgtggcctaattcccagcatgtgcaagcatgcaatacatgttggctacaaaatgcgtgt

SEQ ID NO: 61570 - DNA, 445 bp, Homo sapiens
actttttttttttttttttttttttttgggccgggggggggggggttttttttttttttcccttttttttccctttttttttttttggttttttttcccttggggtaaaaattcccctttttgggccctttaaaaaaaaaaaaattttttttttttttgggccccttttttttttttaaaccaacttttaacccccaaatttcccttttaaaaccccccttaatttttcccccaaaactttggaaccggggggaattttttctcccccccaaaaaaaattccccccctcccctgggggttttttttttcccccgggggcttttaaaacccttttaatttttaaaattttcaaggttcccaaatttgggctttttttgggttccaaatttcccttcccgggggggaaaaaaaatttccccggggcccccaattttttaaaattttg

SEQ ID NO: 61571 - DNA, 297 bp, Homo sapiens
actttttttttttttttttttttttggggggggccccgggggaaaacccccctctttttggaaaacatttccaaaaaacctttaaaaaccccaaaaatttttttaaaacccctttttgtggaattcgggggggaatttcccctcccccccaaagggtggtctctttttaaatcccagggtttttttggaaaaaaatttttacttttaaagggggggccaaaaggcaaatggttttcggggaggctttttttaaaaaaggggcgtgccccaaaatttaaggggttttatggaaaaaaa

SEQ ID NO: 61572 - DNA, 473 bp, Homo sapiens
  misc_feature 445: n = A,T,C or G
ctccaccgcggtggcgccgaggacgcgggcggcctcccaagtgttgggattgccagcatgagccattgtgcctggccctgaaagcatcttatattcctctttcttagcacagtgcctggtgtatggcaggaactcacaaaatatttgttaaataaataggaacattcccacaggaagaacaatcacatctaatggggtagaggtgggaggtggtcaggggaagcagggaagaaataacatttgagagctgagtcttccttgaagtgggaattaatcattcaaaatttactaagtccctattttatgccaggcattgggcaaggacccattggatatacagagatgactgacacagcatttagtttttcagaatctcatcggatagaggagacaatccaggctgagagcactatataaacaaaaggctggagtcctgaaaatgctntatgtgtttgcaagggatatagtttatg

SEQ ID NO: 61573 - DNA, 292 bp, Homo sapiens
acttttttttttttttttttttttgggaaaaaccttttggggaatttttttaaattttttttcccaaaaccccataaaaaacgggcccaaattgggtttttttttgcccccctttttttcccaaaaacccccctttaaaaagggggttttttaaaaaccttttccccaagggctttagggggccaaacggggggtttttttttcccctaaaaaaaaaagggggcctttttaccattaaaaatccccgggggaaaaaattttggaatttttttgcccaaaccaaaaaaaaaaa

SEQ ID NO: 61574 - DNA, 294 bp, Homo sapiens
actttttttagtttttttttttttttttttaagggcgtacctttcctaaaagtttaccttgggaacccttgtaccttttaaaaacactttaaaggggttaccagtttttgccaatttgcctattccaaaaacctaaccttgggtccatgtttccaatgtctaaataaaaaaggggaaaataaaaaacctaaaaatgaaaggggattccatggccttccccttttaaccttttataataaatgaaacaaatttgatttttggggaaaatcccctcaggcaaagtgacaaaggctt

SEQ ID NO: 61575 - DNA, 297 bp, Homo sapiens
actttttttttttttttttaaaaagggaattttttttttgccccccaggtggaatgcaagggcccaaatttaacttaattgaagcccccccctccgggttaaaaacattttttttcccaaaccctttgaataagggggaataaaggccccccccaacaagccggggaaaatttttttggtttttaaaaaaaaaacgggtttaacctttttggcccaggggggtttaaacctctgattttaggggaacccccctccttggccccccaaaagggtgggaataacgggctaaaccttttc

SEQ ID NO: 61576 - DNA, 333 bp, Homo sapiens
actgctttagcttggctgtatcctgtaagttttggaacaatgtattttcattttcattaatctcaaagtattttctcatttcccttatgatttcttctttgatccactgtttatatcccacaaatggcgaatttcccaactatccttctattactaattgtttattatttccactgtgatcagagagcttaccgaagtttttcttgaatacattcttctcagattggtggaagcctctgtttcctttccagagttctggaaaagttaattttcacaacgtttgctagcgttttcactgctttcatgaaagggcggatctatgggggcgggggg

SEQ ID NO: 61577 - DNA, 283 bp, Homo sapiens
actttttttttttttttttttttttgcaaaattgggggaaaaaaaaaaggggaattttttttttccattcccccccccccccccccttttttttcaaaaaaaaaaaaaaggggccgaaaacaaaaaaaaatttaacccgggcccccccaacccattttttaaaaaaaacttaaaaattggttttaaaacaaactttttaaggagggaggggggggaaaaaaatttttggggggttcccccctttttccttggaggaaaaaaacctggttttttttaaaacttt

SEQ ID NO: 61578 - DNA, 271 bp, Homo sapiens
acttttttttttttttttttttttttttaaaaaacctttttatttgggggtttttttttttttaactttttaaaaccccccttttgttttttaaaacaaaaaccaaacccgggggggggccttttttgaaacccggcctttccttttttccttggggccattaaagccccccgggggggggttttccccggccccttaaagggggcgcccccgaaccccccccgggggggggggtggcaaacccccccaaagggccccccccagggggggg

SEQ ID NO: 61579 - DNA, 295 bp, Homo sapiens
acagcagggaacaagacaatcttgttccatactcacatggatcttaccttacacaagaaaagagggacctggagcagacagatagttacttagtcaccatgtgttaagggcagtagaggagaatgcagggtgtgattagtgtattttacccagacccttggttcatttgaggaagggacaattaatccaacatctggagccaggtaagaaataagccaggtaaagggctggagaaaacatttgaggcacaggaaaccaaactacctttacatgctgtgaaccacggccttggata

SEQ ID NO: 61580 - DNA, 334 bp, Homo sapiens
  misc_feature 123, 124, 125, 126, 127, 128, 129, 130, 131, 132, 133, 134,135, 136, 137, 138, 139, 140, 141, 142, 143, 144, 145, 146,147, 148, 149, 150, 151, 152, 153, 154, 155, 156, 157, 158,159, 160, 161, 162, 163, 164, 165, 166, 167, 168, 169: n = A,T,C or G
  misc_feature 170, 171, 172, 173, 174, 175: n = A,T,C or G
gggagctccaccgcggtggcggacgcgcccgggcaggtactttcttttttttttttttctgcatccctgtggtatccactattttcttatatctgttctttctcttttttgtgatcttctttnnnnnnnnnnnnnnnnnnnnnnnnnnnnnnnnnnnnnnnnnnnnnnnnnnnnnaaaaaaaacccgcgcgggcgggggggggggggcccccccctttttttggggcccccccccaaaaaaaaaaaaaaaaaagaggggggggcccccttttttttttccagggggggggggggggggcccccccccaaccaggggggttaaaaaaaaaaggga

SEQ ID NO: 61581 - DNA, 204 bp, Homo sapiens
actaccagttaatacctatgatctatttctccatgaggatgatcttactattttagacatgtccagggaagaatgaggtggttatggctttaccttagaatttagttagattataaaaggctgcagcatgctggcatggaggagagctcagcactgtgggctagtttgttatcagggtaaatcagcacgtttggtcatgtggtg

SEQ ID NO: 61582 - DNA, 291 bp, Homo sapiens
acatttatagtaattttcctcaggttactaccataaatttatattgttcattaaatgttcaataatgtatatattttttactatggcaattaagtgcccactctacatcaggcaccatacaaagcctttacccccagagaccagaggttctcaaccagaggcaattctgtccctcaaggaacatttggcaatacctggaggcatgtttggctgtcaaaacaggggcatacttcttgcgtctaaggggtagaggccaggcatgctgctaaatatcctgaaacgcacaagcca

SEQ ID NO: 61583 - DNA, 218 bp, Homo sapiens
  misc_feature 14: n = A,T,C or G
ctccaccgcggtgngcggccgccgggcaggtactttttttttttttttttttttttttttatttttttttaaaaaggggaaatttgttggaattcccttggaagggccattatttttgggaaaaattgggggggttttttttttcccaaccttcctttttttttttcctttgtaaattttggggatttttttctttgaggggggtatttttccccctc

SEQ ID NO: 61584 - DNA, 248 bp, Homo sapiens
acatgatttttttttttttaactttttactgtcaaaaatttcaaacagggacaaagggtaaaaataatagcaaaatgaacccccatgttcttatcactcagcttcagcaattatgggtcatagctgatcttattttattcctgcatacccttaccttcttccccactccatataattttgaagcaaatcttagccattgtatcatttcatcagcgagaattatagtgtttgtcttatctaccaggact

SEQ ID NO: 61585 - DNA, 235 bp, Homo sapiens
  misc_feature 191: n = A,T,C or G
ctgctatgcattcctcatgcatatgcctgtacaacctttatgtgcgtccacttgccctctttgtgctcgattatagagacgctcaattagcactctactgccctgattgggattacactgattgtgattatggaaaatggaggagcagcagcagtcataaaagaaggaagagatcacatagcagtgcccangagaacaagcgctgcaaatacccatcactctaaatgtgtgatag

SEQ ID NO: 61586 - DNA, 231 bp, Homo sapiens
actttgtttttttttttgtttttttgttttttaaaacacgggtttttgccgagggggaaggctgttcttgccgcccccgggggtaaaaaaacctttttttttttccttcccaggggccctcttctaaagttttattttttctttgaaactccgaaggtgttaaaagtcccgtaaaaaacgtaccgttaacagtttttgataacccgaggggcttttttttttaaggggggg

SEQ ID NO: 61587 - DNA, 327 bp, Homo sapiens
ctccccgcggtggcggccgaggtacttttttttttttttttttttttttaagggcgccccttcccaaaaattttcctttggaaccccttgacccctttaaaaacctttaaaggggtccccccttttggccaatttccctaacccaaaaaccaacccttgggtccttttttccagggccaaaaaaaaaaggggaaaaaaaaaaaccccaaaaagaaagggggtttccgggcccccccctttttaccctttaaaaaaaaaagaaccaattttttttttgggggaaaccccccccccccaaaggcccaaagcctgggttgcatttacccc

SEQ ID NO: 61588 - DNA, 328 bp, Homo sapiens
acttttttttttttttttttttttggtggttttttaaaaaaaaaaaggtttaccctttttccccagggtttttttaaaccccgggcccaaattggtccttttcccccacccccccaaaggggggggattaaaaaacaaaccctttgccccccgtcctggatttttttttttaaaaaaaaaaaaacggggggtcaaccttaaaaccccctaaaaaaaagcccttttttttttaaaagggtttttttaaaaaaatattttttatcccccccctcaaaaaccccaaatttttccccaaagggaaacctaaaaaattaaatttctctttttt

SEQ ID NO: 61589 - DNA, 295 bp, Homo sapiens
actttttttttttttttttttttttttgttttaaaaaaaaacttttgggttttttttttttaaccccaaaacccaaaaaatttggggggggaaacccttttaacccaaaaaaaaaaggggggacctttacctttggccccccaaaattggccccttattcccccggcaaaaaaagggtttttccctttgaaaaaaaacaaaaaaattcccctttaaaaaaacccctgggaaaaaaaccattgccttttaaccccttagggtttttaaaaaaaaaaaagaatttttaaaaaaaaat

SEQ ID NO: 61590 - DNA, 435 bp, Homo sapiens
actttttttttttttttttttttttttaaaccccttttttttttttttcttttttttttttaaaaaggtttcccaaaaaaaaagggggtttttagggggattttttttaaaccccccccccccaaattaaccccccttccttttttaaaatcccccccccccggaaaaggtccccccttgcccaagggttttccccttttttttggggggaaccccatttggcccaaacccctttaaaaatttaaaaaaaaccccttttttttttaaaaaaaaaacccccctttttgcaaaagggtttttccccccccccttttaaaaaccccccccccccccccgggtttaaaaaaaaaacaaccaaccttttcccccttttttttttccccaaaaaacatttttttttttttccttttaaggaaaaaaaaaaaggtttttttt

SEQ ID NO: 61591 - DNA, 296 bp, Homo sapiens
acttttttttttttttttttttttttaacccccccctggggggggttcaccggggggaaaaaaaaaccttggggggtaattaaaaatttggggctttaatttggcactccgggtttaaaatcccccccccctttttcgggaaaaaaattttttttttttcttaatacaaaaattttttttttatagggggaaaaaatggccccaatgggggggggaggactaaattttttttggggaatttttgggggaggggggggagacccaacccccttctttatagggggggttttttaacc

SEQ ID NO: 61592 - DNA, 419 bp, Homo sapiens
acttttttttttttttttttttttttggcccccctttttggggggaaaaatttttttttttttttaaaaaaggggggttttttttttaaattcccctttttttttttttttttttttcccccccccggtttttgggttcccagtttccccctaaaaatttttttttttccaaaaggggttcccccccccccccccaaaaaattttccctttttcgggggggttaaaaaaaggcctaaacgggggttaaaaagacccaattcccccgggggaggggattaaaggggttttaaaccccccgggggtaaatcttttttaaaaaaaaccccctcaaattttttaaaacccccccacctttaaaaaaaaactttaggggggtaaaaccccccttttttaaaaaaaaaaccctggcccctttttg

SEQ ID NO: 61593 - DNA, 318 bp, Homo sapiens
cgcggtggcggccgaggtacttttttttttgttttttttttttttaaaaaaaaaaccccgttattatttccgggtttgaggattagaagaaaattggggattaggtttttaaccttaagggtttttcctcttttaattaaggttttttttttttaattggggggggtaagtaccccccttttttttggggaaattttttaaagggattttaggcctgtacctatttttttaacccctttaattggaaaattttttttttttcaggaaaccttgtttcctcccccaaaaatttcccccattgggttattatgggggggt

SEQ ID NO: 61594 - DNA, 274 bp, Homo sapiens
acagtaaaatattttcagctttgcaggccagatgctctctgtcccagctacttagcgctgctgttgtggagcaaatataacccaacccatctgtaaacaaacgggtgtgactgttttccaactgttccaataaaactttatttacaaaacaggcgacagctggattcagcgcatagaactgtagtttgtggggcccctactctcaagcactatccctggaagtccttaacgtttctgtggcttcaactcatgcctgtatcctggtgattcctga

SEQ ID NO: 61595 - DNA, 370 bp, Homo sapiens
ggacgcgcgttctacgtacttcagctttgaggccgaattgggagctccaccgcggtggcggcgcgcccgggcaggtacattgagctcatggtggcatatattcagttctttccttttggcggggatgttttgctccattatttctttaaatattttttctgcccctttctctttctcttctgatacgtgaaaatcctctttgctcaccctggctccagtgtgctgcaccaggaaggcttgtggactgacagctgcctgccatgaggttgagggtggaagatggtagctgctacaatgtgaaagctgaacttgaccatgattttctgaaattaccagagactttgcccctggatgctacaagtgttcttct

SEQ ID NO: 61596 - DNA, 304 bp, Homo sapiens
tccaccgcggctggcggaccgaggtactttttttctttttttttttttttttttaagaggcctacctttcctaaaaattttctttgggaacccttgaaccttttaaaaaactttaaaggggttaacacttttggccaattggcctattccaaaaacctagccttgggttcatgtttccatggtctaaagaaaaatgggaaaaataaaaaacctaaaaagaaaagggaattccatggcctcccccttttaaccttttataaaaaatgaaccaaatttaatttttggggaaaacccccccagccaa

SEQ ID NO: 61597 - DNA, 200 bp, Homo sapiens
  misc_feature 57, 67, 117, 126: n = A,T,C or G
tctagccacccccccccccccccccccccccccccccccccccaccccccccccccnccaccccccnccccccccagcccacgcccccgcccccaccccccccacccccccccccgnccccgccantgggggggttgggggggggggaggggggaagtggggcggttggggggggggggtgggggggggggggggggggg

SEQ ID NO: 61598 - DNA, 294 bp, Homo sapiens
acttttttttttttttttttttttttttaaaatttttgggtttaaccctaaccaacccccccccttgggccccctttaaaggggttttgggctttttttttttgtttttttgggaaatttcccggaaaagagaaaccccccatttgggtttcccggaaggggtttttcccaggaaaccctttttgggggccccccgggggggaacattttccccaccctaattccttttttttccccaaaaaaaggcccttggtaaaaaaaaccttttttttcccccttcccccattaagggtt

SEQ ID NO: 61599 - DNA, 291 bp, Homo sapiens
acaagcacataccaccatgcccggctaactttcgtatttttagtagagacggggtttcaccgtcttggccaggctggccttgaactcttgaccttgtgatccacccgccttggcctcccaaagtgctgggattacaggcgtcaaccaccgcgcccaactgaacactgtctttataaaaacacagtcctttcagatgtcgggacttattaataattaaatatattcaaatttatttgcaacaaaaaattacctttcatagaaatgttacattaaaaaatatattttaactta

SEQ ID NO: 61600 - DNA, 246 bp, Homo sapiens
actttttttttttttttttttttttaggggaaaaaaagggttttccctttttccccaggtgggtttaaaactcgggggttaaaaaaacttgcccccccttgcttccaaaagggtgggaaaaacggggggaacctaaaaccccggccccattttttttctttatttttaaaacttggggggttttaaaaaaaaaccccccccccaaaactttttaagggaatttcttcttttttttaccaattttaa

SEQ ID NO: 61601 - DNA, 237 bp, Homo sapiens
acttttttttttttttttttttttttaaaaaaaaatttttttttttttaaaaaatccccaaaccccaaaaaaaaagggtttttcccaaggggaaaaaacatttccttccccttagggggggccgggttaaaaaaaaaagggggcccccccccttgggggcccattttttggggggggggggaaacccttttttttttttcccccattttttaaccgattttttggcccttgggaaaa

SEQ ID NO: 61602 - DNA, 307 bp, Homo sapiens
acatggtatacttttataagactggcagcaaagtaggactgtttacaccagcatcaccacaaacatatgtgcaacatgttgcattattatgatagctgcaacagtcactaagtgataggaatttttcagctccactacagtcttacagggtcactatagtatatgaggtctgtcatcgaccaatacgttctgaatgtggcatatgactgtgctttaaagatgtctctttccctaaatttgcttacaatttaaggtaatgtcactgtctttcaaaaaggaaacaaaatagagtttcttgtaaacaaaa

SEQ ID NO: 61603 - DNA, 182 bp, Homo sapiens
  misc_feature 2, 3, 13: n = A,T,C or G
anngggaacaacnggcccccccaacaaccccaaaaaattttttttttttttaaaaaaaaaggggtttttcccgtttaacccaggagggttttattttctgaacttaaaaaccccctggcttaaccctccaaaattttgggaataacaggtggaaccacccccccggggccaaaaattttttt

SEQ ID NO: 61604 - DNA, 234 bp, Homo sapiens
acttttttttttttttttttttttttttgcccctttatcccccacttttggtaaaaaatggcccccaaaaccccccttttttttcccaccaaaaaaaagggcttttaaaaaaaaaaaaccttgtttcctttttgggagggggaaaaaaccctttccccttttttaaaatggggccccctttttttcttcttttttaaaaggccggggggaatggcccttcccttttccaaaaaa

SEQ ID NO: 61605 - DNA, 301 bp, Homo sapiens
actctagagcagcaattggcaaactttttctgtaaaaggccaaatagtaaatatttaaatattttaggttttgtagacctaaactactcaaactgaactatgtaaacaaatgagtgtggccatgttacaataaaactttatttataaaaataggtggcaggctagatgggctaggacttagcccattggccacagtttgccagcccctgctctagagccagtttagcactactaccagtggccctgtggggtctctactgacagtccagggtgttcaatgaggtctttccaccctaattag

SEQ ID NO: 61606 - DNA, 410 bp, Homo sapiens
acttttttttttttttttttttttttttaccctttttttttttttttttttttttttttttttttcccccaaacccttttttggggggggcaaaaaattggggaaaaaatttggggggggggttccccccaaaaaaagccccgtttaaaaaaaaaaaaaaaaaaaaccccccccccccaaaaaaaaaacccgggggggcccaaaaaaactttcctttttttttggggggggccccccccccttttttaaaaaaccccctttttttcccaaaaaaaaaggggggccaaaaaaaaaaaagggggggaacccccccccccccccccaaaaaaaaggggggggggggttttaaaaaaaaaatttttttccccccccaaacctttgggggaaaaagggggacccccccccccccc

SEQ ID NO: 61607 - DNA, 314 bp, Homo sapiens
tccaccgcggtggcggcgcgagtactttttttttttttttttttttttttttactcccctttggaaaaacccattttttaaaaaaggccccccccctttttttttttttcccaaaaaaccttttttttggggggattaccctccccacccaataattttaaaagggggaaccccccccccttaaaagggggcccttcttttcccaaaaaattttgggccttccccaaaaatgttcccccccaaaaaaaaaaacccgggggtttccctttccccccaggggggggaaaaaaaaaattttttccccccttacttaa

SEQ ID NO: 61608 - DNA, 301 bp, Homo sapiens
actttttttttttttttttttttttttggccttttccccccttatcccgggggggtttttgggggttctcccccgcttaaaaaattttgttttggcaaagggccgttttttcttttttccgtttgggggaaaaatggaaattccctttttggggttaaatcccccaaacttggggaatttggggattttcccccttggggaaccccggcccccgcaaaggggggtttttttccccaattttcaaaaatgggaatttttttttgggggaatttttggggacccaaaacgggggttcccaaaa

SEQ ID NO: 61609 - DNA, 288 bp, Homo sapiens
actttttttttttttttactttaacctaacctgcttagttcattgggggtttttttttttgcccataaacttcctttcccctttaaaaatttttgggggatcccaaaaaacttttatgggttttatttccattttttcccctttagaaaaaataaaacctggaaaaatttaaacctttttttaatcctttaaaaaatttcattgggggccgggggggggggctcacccctatacccccacccttttgggaggctgaggggggcggatcccctgaggtcaggatttcaa

SEQ ID NO: 61610 - DNA, 421 bp, Homo sapiens
tccaccgcggtggcggccgaggactttttttttttttttttttttttcccccaaaacaaaaaagttttttttcccccctgggggcccaaaaagaggggccccggggcccccccctttaaatggcgggcttttttggccaatttttgggaaaccccttaaaaaaaaccccgcttttttttttttttggggggtaacccccctccctttttgccccagggttttaggaaatttgaccccggggctccctgggcccccccaaaaaaaaggggggaataccccccccttaaaaactaagggaccccccgggccggaaaaatttaatttaaacctttttaaaccccccccccctgggggggggccccgccccccatttttttcccctttaaggggggtaaattccccccctggggaaaaaagggga

SEQ ID NO: 61611 - DNA, 286 bp, Homo sapiens
actttttttttttttttttgccgccctgggggaaaaaccttggccttcctccggccccttttaaaaaaaaaaaccaggttttggaatattgccccttttcggccttaaaagaaattaccctaaaaatcccaaaaacccgggtttccccccaaatccttttggcggaaaaaaaccttctttttttttgggaaagggaaattttaaaaaaaaaaattggggccctgttttttttaacccctccccccccggaaattttccccgggaaaaaaaaattaatcccttttcc

SEQ ID NO: 61612 - DNA, 294 bp, Homo sapiens
acttttttttttttttttttttcccccccagggtggaagtttgggggccggccttacccttttttgcccgcccctttttaaaaaacccttccccaattgggcttttaaaaacaaaaaccccttccccccggggcccttttggcctttttggggcaacccccccctaaaaaaaccttggggaaaattttttttgggaagggggggattggggggaaaaaaatatttttccccttaaatttttaaaaggccgtttttttggtggttaaaaaaattaaacctttggcaaacttaaaa

SEQ ID NO: 61613 - DNA, 225 bp, Homo sapiens
actttttttttctttctttctttttttctttttttttttttaggctaggaaagtaaaattgggggagtggaaaaggaccaaaaaaatcggtaccgggtagggatcaattccttgaaaacccttttgtccttggaccaccccagtaggcctttttttaaaactctgagttacctttttttcttttccttgaccagggcctttatttttgtttctggggcaatcctt

SEQ ID NO: 61614 - DNA, 381 bp, Homo sapiens
acttttttttttttttttttaaaaaagggctggttttttcccccaaactggaaggccctggggggaatttggtttaattaaacccccaccttttagggtaaaaggggccccccaacttggccccccattgtggggggatttaaaaattccccccccccccctgggaaaatttttgcctttttgaaaaacaggggttttgcccattttcccaaggtgggttaaaaactcggggcctaaagaaacccccctccccaaccccccaaaagggttggaacaaaaggctaaaccccccgccccgaaaaacttgttaaaattttaaaacccggggcaaaaaagtttttttttttttttttttttccccaaaaaccaggaaaattttaa

SEQ ID NO: 61615 - DNA, 291 bp, Homo sapiens
actttttttttttttttttttttttttttaaaccccccacccgggtttaaaccttttttttaaaaaccccccctttttcaaggaaaaaaaattttcaaaaacccaaaaccccccttttaaattaaaaaattcaaaattttttttattttccccccaataccctttttacccccccccctaaaaacccttttttttttggggggttaaaaaaaccaaattttggtttaaaaattcccccccccttttttttttgacccttcaaggaaaacctttttcaaaagttaaaacccc

SEQ ID NO: 61616 - DNA, 313 bp, Homo sapiens
tccaccgcggtggcagcggccgcccgggcaggtacttttttttttttttttttttttttggggggggaaaaatttttttttttttttttgggggggttaaaaacttggggataaaaaaaattcccccccttgggcccccaaaaggggggggtttacaatttaaaacccccttcccccccccccaaaaatttttttaaaaaaaggggaatttttttttccgaaaaaaaaacccctttttacccgaaaccttaaataatttttgggttggggcaaacacccctttgggtcccccggggaaaaaaatttccccccc

SEQ ID NO: 61617 - DNA, 203 bp, Homo sapiens
actttttttttttttttttttttttttaattttgaaaaaaaaatttttgttgcttcccccaggtgggagggcaggggaaaaactttggttaattgaaaaccccccccccagggttaaccaatttttcttgtttaacccccggaaaaaccgggaataacggggccccccccccccccccaggaattttttttttttaaaaaaaa

SEQ ID NO: 61618 - DNA, 309 bp, Homo sapiens
acttttttttttttttttttttttttttttccccggggccacaacaatttttttttcccccccccaagggaaaaggggggggcctggtcccctttttaaggcaacccccttttcccggggaaaagggttttctttttaggggggggggggggttagggaaacccaacccaaattccccggggggggggcccccccccctttaaaacccggttaaaaaaactgggggccattcaccttggtttggacccctttttttttgaaccaaaggtttttaaaaagccagattttttttaaaaaaccccccttttt

SEQ ID NO: 61619 - DNA, 254 bp, Homo sapiens
acttttttttttttttttttttttttgggcccaaaaaaaaacttttttaaaaaaaaaattttggtttttttttttggggcctggggccccttttgggggggaaatttttcccccgggttttttcccccggtttccctttttacccgggggggcttaaaaaaacctggaattttgggggggcaacaaattaaaacccccccctgggggggggggaaaaattttaaatttttgaaggccccccaaaacttttttgc

SEQ ID NO: 61620 - DNA, 332 bp, Homo sapiens
acttcaaatgtgattgtaacaatactactgatcaaggtgaggttgtgttcctggcacatgctagaagtttttatctgcaacacttatctccagtaaagactatcaaaggcatgaagatctaatacattacgagagatcaactcttgatctttgaggctctaagattagtcctagtccatttatggatctagtagcttcattgataaggccatcaggtttctcttctgttaaatgtcttaatccatattttgaatccacaatcccgcgtccttgcgcccgcactaagagtcaggaactgtgataggagcttcacattctctctctaatctgca

SEQ ID NO: 61621 - DNA, 316 bp, Homo sapiens
  misc_feature 265: n = A,T,C or G
accccctaatgcaggtatgacttagatcacaacaccgaagttctttccaatacctggaaagtcttcctaaggacagatacaaagaagccctgaatgcaaaaattacagtaaatacctaactcatatatatgcccagacaccagcaaacatccataagcatcaagattatccaggaaaacgtgacttcaccaaatgagttaaatgaggcaccagggaccaatcctggagaaacagatatgtgacctttttcagacagagaattccnagagctgctttgagggaaactcaaagaaattcaagaatatatgggaaaagg

SEQ ID NO: 61622 - DNA, 254 bp, Homo sapiens
actttttttttttttttttttttttaatttaacaacattttttttggaaaacccccaattttttttttttaaaaaatcaccctcccgggtttaaaaaataccggggaggccccatttttctttgaaaaataacgggggagcaatttccccctccgggtaaaaccctgggtttttttttggggcatttcttaagggcccggggggcttgaaaaaaaattcccttttcaatccccccccttttttggagggggggg

SEQ ID NO: 61623 - DNA, 250 bp, Homo sapiens
actttttttttttttttttttttgggaaaaaagggttttttttttttccccagggtggttttaaactttgggtttaaaaggattcccccccttggctctttaaagcccggggacctccgggataacccccccttcctaattttaaaaaaattctggatactggtgggcctaaactggaaacccccaaaaaaagggataaattccgggaaccaaaacattttccaaattctaatcgggaaaaaaataaaac

SEQ ID NO: 61624 - DNA, 482 bp, Homo sapiens
actttttatagaagaaaattggaaataagtaagttcagctgtaggggactgttttatgatttattctagtgatgaaatattatgatatttcataatttttgataatattgacatagaaagatttttgtaatatattgagagggagaagaatagtcatcgttctttctgaatagtgggattattagtatatgagatattttcatttggtctcttatattttctgtttttcccctcccttgaacattgttttttcaaataaggaagcctatttttattttttaaaaacccattagaaatttttctgttttcattttcatatacctgaagtttaaatgccttaactatatacccatttttacatagcattgtggaagcttaactgttatgtgtgtggattttgtctgtttctaagaaagtgccaaaaaaaaaaaaaaaaaaaaaaaaaaaaaccccccccccccttaaaaaaaatggggcccccc

SEQ ID NO: 61625 - DNA, 380 bp, Homo sapiens
gcggtggcggccgagtacttttttttttttttttttttttttttccttttttttttttttttttttttttttttttttttttttttttttttttttttttttttttttttttcccccccaaaaagggggggggggttttaaaaacccccgggggggggaaaaaaaaaaaaaaaagggggccccccaaacccccccccaaaaaaaaaaaaaaaaggggggggggggccccccccccccaaaaaaaaaaaaaacccccccccccgggaaaaaaaaaaaaaaaaaaaaaaaccccccccccccccggggggggggccccccccccaacatttttttaaaaaaaaaaaaaaaaaacccccccccccaaaaaaaaaaaaaaaaaa

SEQ ID NO: 61626 - DNA, 299 bp, Homo sapiens
acgttcccggttctgaaatactggttccaggagctcgtgttatcagaggcctggattggaaatggcgagatcaggatggcagcccacagggagaaggcactgtcacaggagaactacacaatggctggattgatgtcacctgggatgctggtggctcaaactcttaccgtatgggcgcagaaggaaaatttgacctcaagcttgcaccagggtacagttttatattgtgggaaactagaaggattaaactgaggaagggcaggaaatgaatccaggccacctcggccgctctagaacta

SEQ ID NO: 61627 - DNA, 230 bp, Homo sapiens
acttttttttttttttttttttttttttttttttttttttttttttttttttttgaaaaaaaaaaaaaaaaatcccccccccccccccccccggggggggccggggggggggaccccccccccccggggggggggggtagggtaaacacccccccccccccgcgagggggggggaaggaccttttgtggccccgagaatggccacaaaagtgggaaatgaattccagtat

SEQ ID NO: 61628 - DNA, 436 bp, Homo sapiens
  misc_feature 313, 314: n = A,T,C or G
actttgcactgatttttgtcagctgtaaagtaggggccaatttcattcctttgcgtgtggatgtcctgtttcccagcaccatcggtggaagcggctgtcttttcccattgaggagtcctgccatcctggcacctgtgccaaagcccattcgaccttgagtttgagggtttatttctgggtcctcgcctctgttcccttggtccatacaccacctttatatcaggacggtgatgctttcattcctgtggcttggcagtaaaattttgaatcaggaaaaaaaaaaaaaaaaaaggaaaaaaaaaaaaaaaaaaanntggccccggggccctttaaaaaaatggggcccccccgggggggggaaatttatttaaacttttttaacccccccccccctgggggggggccccgggcccccttttttttcccttttaagggg

SEQ ID NO: 61629 - DNA, 291 bp, Homo sapiens
acttgggagaaatgcactgattctggttgccacgtggatttattttgggagtgatattgatctaactttatggaaataatactagatagaaagttagcggatggattctctatctaatgagagttttgggcaaatcgaataccaagtttccgagtcttacttttcctctgatgcaagaaaactctgaattagccagcctgtgaaaaactctcacagctctggatgttgagtttaggacactggatttctaccactcaatttcttactacttttcttgcgcagggatcatgg

SEQ ID NO: 61630 - DNA, 334 bp, Homo sapiens
acttttttttttttttttttaaatttttatggacctttctgggggtttcccaaaaaggggggttggggcggggccttaggatatttggggaaaaagggcccccaaaaaaccttttttgtttttttaaaaatttttgccccaaaaaggccgggtttccaaaaaatggggttaaaattgtcttcccttcctctaaaaaaaaaatttgtttttggggataaaaaaacccccttgaacccccttccaaaattttatttttaaacccccgggggggctgacctaaaaacagggggggcaagggattcccaaacaaaaaaagggcccccccccccttttt

SEQ ID NO: 61631 - DNA, 234 bp, Homo sapiens
acttttttttttttttttttttttttccccccttttttttttttttttttttttttttttttttcccccccccaaaaaaaccccttttaaacccgggggggtttttttttttcccccccgggggggggcccccccccccaaatttggggggggcccccccaaaaaaaacccccccccccccccccaaacccccccaaaaccccccccctcccccccgggggggccccccccccc

SEQ ID NO: 61632 - DNA, 262 bp, Homo sapiens
acttttttttttttttttttttgggaggggggttttttttttaccccggggggaaggcccccccaattttggtttatttaaaactttaacccccggggaaaaaaaatttttttgcccaaacccccaaaagagtgggaaaaaacggcccttcccacccccccgggtaaatttttgtttttaaaaaaaaaaaggggtttaccctttttggaccagaagggtttaaaattcctaaccttggaaacccccccgcttggcccccaaa

SEQ ID NO: 61633 - DNA, 389 bp, Homo sapiens
actttttttttttttttttttttttttaaaattccccccccttttttttttttgcccttaaaccccggaaaaccgggccaattttttttaagggggaaggggaaacccccccccccaaatttttttccccccccaaaaataaaaccacttttcttggggtaaaacccgggggggaaaaaaaaatattaaaacccttttttctcccccttttaaacccttagggattttttggggggggaaaaaaatcccaaaaccctcccttcctttttttaaaaaaaaatcttttacccttttttttaaaaattttaaaaacccctttccaaaaacctttttttttttttttttttctggaaagggaaaaattttccccgtgggaaaaaagggggtgg

SEQ ID NO: 61634 - DNA, 382 bp, Homo sapiens
actgtcacccatggccctgataggaaacagatggcatattcaagctggataatttgaagaggattaaatgaaacaagtattcacaaataggtgggcagagtttagaaaatcaacaagagatattgtagtatcctgggctagcaacagagaggatgggaatattgccccatagacctgaagtgcaaagagaaggagtgctacctcaaaaagagagctttgtggagaaggctgcctgatagcagctgtagtcccaggtagagggtgagccaccacgcccggcggttattacatagttttaaaagtgactcctcttaggaaattttaattaagagaaaaataccctagaactatgattagggtcaaaacagtatctatgttcttt

SEQ ID NO: 61635 - DNA, 291 bp, Homo sapiens
acaagttacttgacctctcccggactcaggtttcttccctggaaaattagaatatttcttacctcttaaaattgttgtgagacttaaaggataatgtgcttaaaatccctggttcaatgcctggtagatattttgtgcttagtaaatattaaactctttccttccatttctccttttatctctccattattaatctcctcccttgccttagaggcagtgagatggaaaaaaacttggcgttcacaatcagacacaccgcaatttgaaaccttatgtttaccattgactagc

SEQ ID NO: 61636 - DNA, 296 bp, Homo sapiens
acttacttttacactgtaatttgaattatgtggtgaaactagtagatgctgtaataccataccgcattttaaaaataattcaatattctgttttctaggttgctttgtctaattgattactatgaatctaaaattagaaaaattcatacacaaaggcaatataaagaagatgaaagtcagtcagaagaagaaaacgactacagaaatctggatgcctcaccaacttataaaggccttttaatgtcattacagaatcaactcaaggaatcaaaatctaagattgatgcactttcaag

SEQ ID NO: 61637 - DNA, 477 bp, Homo sapiens
  misc_feature 306: n = A,T,C or G
tccaccgcggtggcgtctaatgaggccgggcgcggtggctcacacctgtaatcacagcactttgggaggccgagggggcggatcacgaggtcaggagattgagaccatcctggctaacacggtgaaaccccgcctctactaaaaatacaaaaaaattagccaggcgtggtggtgggcgcctgtagtcccagctactcgggaggctgaggcaggagaatggcgtgaaccctggaggcagagcttgcagtgagctgagatcgcgccactgcactccagcctgggcaacagagcgagactccgtcccanaaaaaaaaaaaaaaaaaaaaaaaaagccccccggccctttaaaaaataggggcccccccgggcgggggaaatttaattaaaatttttttaaccccccccccccggggggggggcccggccccccttttttttcccttttagggggggtaaatgcccccctggggaaaaaaa

SEQ ID NO: 61638 - DNA, 472 bp, Homo sapiens
tccaccgcggtggcggccgggcgcggtggctcacgcctgtaatcccagcactttgggaggccaaggtgggcagatcacctcctgaggtctgaacttcgagaccagcctgaccaacgtggagaaaccccgtctctactaaaaatacaaaattagctgggcatggtggtgcatgcctgtaattccagctactcaggaggctgaggcaagagaatcacttgaacccaggaggtggaggttgcagtgagcagagattgtgccattgcactccagcctgggcaacaagagcaaaactccatctgaaaaaaaaaaaaaaaaaaaaaaagccccgggccccttaaaaaaaaggggaccccccggggcgggggaatttaatttaaagttttttgaaccccccccccctgggggggggcccgggccccccttttttttcccttttagggggggtaaatgccccctggggaaaaaaagggga

SEQ ID NO: 61639 - DNA, 216 bp, Homo sapiens
acttttttttttttttttttttttttaaaaaaaaaaaattccccctttttcccccgggggggcccaaacccctggtttaaaagaattcttttgccccaacctttaaaagaccctaaaaatttttccccccttaaatttttttttctttaaaaaaaccccctttttttttggggggtttttttggaaagaaaaagaaaaaaaaggggtttaaatttt

SEQ ID NO: 61640 - DNA, 325 bp, Homo sapiens
ggactccaccgcggtggcggcgcgagtacgcgggtgaaagatgtagctatgccttacactgctcaccacacagaacaaggcccattgcttggtgggacactttggattttggtggcaatgtattttgatgtgcttctctggtatatttaccagataacaataacccataagactgtcaggttttagtggatcccagaccaagaaaagggtctgcagtaagagtagactatagtgaaatctggtcttccatttgagtgttatgacttagtattgaaagtgtatgcagtcataaaaaggaatgagatcatgtcctttgcagggaatg

SEQ ID NO: 61641 - DNA, 216 bp, Homo sapiens
actttttttttttttttttttttttttttttttccgggtaaaaaaaaagggccttttttttttttttttggggggggggccccccaaagggggggttaggccccccgggggggggggggcctgggaaaaaaaaaaaaaaaggcctgaaaaaaaggggggggttttaaaacccccggcccagggggccccaagccccctttggggggggggcccccc

SEQ ID NO: 61642 - DNA, 222 bp, Homo sapiens
actttttttttttttttttttgggttttttttttttttttttttttttttttttttttaagaaatttttttttttaaaaaaaaggtttttaaaaaaaaaaaccccccccgggccccccaaaaggggggaaaccccccccaggggggggaaaaaaaaaagaggggcggccggaaacaaaaggggggaaaaaaaaagaaaaaattgttaaaaaaaaaaaaaaaa

SEQ ID NO: 61643 - DNA, 473 bp, Homo sapiens
  misc_feature 439: n = A,T,C or G
acacctatttcttgtattttgtaagtgaataaaatgttgctcagagaagttaaataacctgcatatggccatacagctagcaggtcacataaccagcttaatctttctggacatcttttaggttacagtctatgtctcctctatgcataggaattgtaggataaatacttgttaaataaacaaaggtcagatctgctctattctctgctgcctaccaacaaactatactttactagcttgactgctgttttgccataatatcctgtcatctatgcaatgattcaggctacagccagcagatacgtgggggagagtataggctttaaatcatacagaccaggctctaccatttacttgctgtgtgatcttgagcacattttttgacatctctgagcaaagaagggcaggattcagttaataaaagtaacatatattaatntattctatacttccatgtgaaaaggtgtactctt

SEQ ID NO: 61644 - DNA, 342 bp, Homo sapiens
tccaccgcggtggcggccgccgggcaggtactttttttttttttttttttttttttttttaagagggggaaccccggaaaatatttaaggggtttggaaacctttttttaaaaaaaccccggggggagggggaaaaaatttttttaaaaagggggttaaaattggccccaacaaaaacggggggtttcctttcaaatttaaaaaaaacgggggggtaaaaagggggttttgggaaaaaaaattttttgttaaaattcaggggaaaagcccccatttttttcccccaaaaaaaattggggggggggggggtttaaaaaaaaaaagggggggttttccgcaaaa

SEQ ID NO: 61645 - DNA, 144 bp, Homo sapiens
actttttttttttttttttttttttgggcccccccctgggggggttccccgggggggaaaaaaaaccttggggggggattgaaaaattgggcccttaaattgcccctccaggtttttaaccccccccccccttttcccgggaaa

SEQ ID NO: 61646 - DNA, 297 bp, Homo sapiens
acttttttttttttttttgaaaacaaattttaaatttgcccccaaggtgggagggcagggcccaattttaattttattgaaacttttcctcccaaggttaaggctttttccccccctaacccccccaatttttgggaattacatgggggcaaccagcctgggtaattttttggtttttaaaaaaacagggggttaaattggttaaccaagaagggtttaaatttccaaacctggaaacccacccacttggccccccaaaagggttggaataacaaaattaaccccccaccccgggac

SEQ ID NO: 61647 - DNA, 528 bp, Homo sapiens
ctccccgcggtggcggccgaggtacttttttttttttttttttttttttttaaaaaaaaaacccccctttttttttcggggttgggggaatggaaaaaaatgggggtttggtttttaaaccttgggggttttttccctttaaaaaggggttttttttttttaatggggggggggaaacccccccctttttttgggggaaatttttaaagggggttttgggccttcccctttttttttacccccttaaaaaaaaaaattttttttttttaaaaaaaccttttttcccccccaaaaatttccccccattggtttatttggggggggaagggcaggtttcccagccttttttaaaattcttaaaaaccttttttgggggaaaaaatttaaacccccttaaaaaagattttttccccccttggaggcccccccaaatttagatttccctccccaaatttttttgggggttttacccccgggcccaatttaaaaaaaaccccccccggaaaccctcagggggtttaaaaaaaa

SEQ ID NO: 61648 - DNA, 230 bp, Homo sapiens
actaaaactctttcactgatcacaacagctactaattcagcaaattatcagtcattcaaaattccccaaattgctgaagctctaaccagaaattcttactgtattttgaaatcttagaacatttaaaatctcctgcataacttatttcattttatctactttggaagttcaaaagaataggactcagttgagatgtatatatatatagcctgttacatgcctccactgtg

SEQ ID NO: 61649 - DNA, 292 bp, Homo sapiens
actcaaatcctaaaacaaaaacataatctgtggaaaaataaagtaagtctgcctgactggaaagaatcaggactaggataacacttcccacacaaggtagcacttcttatgcaatttctttgaaaaaaaaaaaggagtttcttaaaaaaaaatgaaaagttaaaatttttatttttcatatatttctaccacaaaacaaatttgtaaacattaagcactgtctcaccctattcagggtgatactgatttccttctgtaaaagctttcactcacagtttgatcaggaaaagca

SEQ ID NO: 61650 - DNA, 267 bp, Homo sapiens
acttttttttttttttttttttttttggaaaagagaggggttaaaccttttagcccaaaagggggcaaaagcactggggctaagggaaccccccgttttggtttcccaaaacgcgggggaaataataagggggaaaaccctgtgcccccacaattttttttttaaaaaaaaaaaaaggggtttttttcccaaaaaaaaaaaccccttataaaatttttgggggaaaaaactttttttttaaaaaaaggtttttccctggggggaagg

SEQ ID NO: 61651 - DNA, 571 bp, Homo sapiens
actttttttttttttttttgggggaaaaaagggttcccccccgggccccaaaataaaaagggaaaaggcccttttcctttttggttggccccttggttttccccattgggaaaagggggatttgaaagaaattttttttaaaccccccttggacccttgaaattttggccccaaaaattggggggttttttgggggggacaaaaaaaaccttaaccccaccaaacgggggcgggggtcccccccttttttttttaaatttttggggggggggccccccccaaaaaaaaaacccttacctttttaattaaattttgggcccaggggcccccaaaaataggggtggggggcgaaaatttttaaagttaaagttggtttttttgcccaaaaaaaattttttttaaggttttccccctcttaaaccccttccccctgaaaaaaggttttaaggaggggaaataaaaaccctttttgggtgaagggaattttaccggggggggggaaaaagaaaaccccgggtcctttggggccccggccgggggggccttttaaaacctgggggacccccggggg

SEQ ID NO: 61652 - DNA, 421 bp, Homo sapiens
actttttttttttttttttttttttaagggcgccccttcccaaaaattttcctttgggaacccttgtcccttttaaaaacctttaaaggggtgcccccttttggccaatttccctaacccaaaaaccaaaccttgggtccttgtttccagggccaaaaaaaaaaggggaaaaaaaaaaaccccaaaaagaaagggggtttccgggcccccccccttttacccctttaaaaaaaatgaaccaattttttttttgggggaaaacccccccccccaaaggcccaaggcctgggtttcatttaccccttagggcccttggggggttaaaaaaaacccccaaggggccccaaactttgggccctcaaggaaaaaccacccttttcccggggggggggtaccctaaggggtttgggtttccccgcgg

SEQ ID NO: 61653 - DNA, 276 bp, Homo sapiens
acctgaacaaatcccatcaggtacagattctcagtacttgaagaggcagcacggtaaaggggaaagatcatgagttttggggccaggttcccttggatattgtggggtccccacacttctggatgatgttggataactctttgagacttaggcttcacatctgtaaaatggaaatacttatttttcagagttgtcataaacactaaatgatttgacttatatcaacctaattcctactggctcatcgaactcagctcagctgtcccctctgttcgg

SEQ ID NO: 61654 - DNA, 316 bp, Homo sapiens
actcagcaaaaagctgagttattagaaaatggacactagcctgtgcttgtgggcataaattctccatctatgagaaggcatgaattgaggcactatattgattacattatgtcgtttattctcatacaactctctattgtagaaacgatttctagccccatcttcaagatgggaaatggaagcctagagaaacttcatttttctcctatatttgtatttagcaattgctattgctgccataagaaaataacacagggtggcttgaacaacagaaatttattttctcacagttctggaggctggaagtccaagatca

SEQ ID NO: 61655 - DNA, 440 bp, Homo sapiens
taccactgttgatatggtggtatttaaattctggtctaccctatttcacatgccttgtttacttttcagagctgacagattgctgctccatgcattctgtccagtttcctaagagagacagcttggagtatgcttaatccatcttacctgggactgaaacagctgcttattttgccgttaaaaactacatgcagtttactgcgtggctccgggtttgtttgtttgtttttcctctttaataggtttattcagaaaacatgtccactgcaattagggaggtaggagtttggagacagaccagaacacttctactgaagaattacttaattaaatgcagaaccaaaaagagtagtgttcaggaaattctttttccactattttttttattttggttaatattaattagcatgatgcatccaaataagaaatatgaagaagtg

SEQ ID NO: 61656 - DNA, 178 bp, Homo sapiens
tttcattattgatagtgcctttatttgtgatgagtgtttgtcgacgcatgtggccctttttaagagactacacaaactggaacgttgttgccattagtcaagctagtgagatagtatatctatctatctccccagaagaaagtgcgatatttgatggggcgcggattcacaagaggga

SEQ ID NO: 61657 - DNA, 302 bp, Homo sapiens
actttttttttttttttttttttttttaaaaataatctttcccctaaaaattttttcaaggggggtggttttttttgttgggaactgccccctaaaaaggtttgaaggaccccaaaatgtggggaaattttttttccctttttttttaaatcccaaaaacaaaaacttgtgggaaacccccaaaccctgggggaaacccccctaaaaaaaaattcaactggaggggaacggccaaacccctttatgaaaaacccttgaatttcggcattttaaagtttttttttttggggaaaaaaaaaatt

SEQ ID NO: 61658 - DNA, 554 bp, Homo sapiens
  misc_feature 383, 404: n = A,T,C or G
tccaccgcggtggcggccgttccggaaaggagaaaaggatccagacaatgaatttgttgtgagttcaccccttttgtcctttaagaggtaaaattaacgggctgagcacggtggctcacgcctgtaatcccagcattctgggaggccgatgcgggcggatcacgaagtcaagagatcgagaccatcctggctaatacggtgaaaccccatcggtactaaaaatacaaaaaaattagccgggcgtggtggcacgcacctgtagtcccagctactcgggaggctgaggcacgagaattgcttaaacccaggaggcggaggttgcagtgagctgaggtcgcaccactgcactccagcatgggcgacagagcgagacttcgtctcanaaaaaaaaaaaaaaaaaaaanggcccccgggccctttaaaaaataggggacccccggggcggggggaatttaatttaaatttttttaaaccccgccccctggggggggggcccggccccccttttttttcccttttaaggggggttaattgccccccggggaaaaaaaggg

SEQ ID NO: 61659 - DNA, 236 bp, Homo sapiens
actttttttttttttttttttggggaaaaaccccttatttttaataaaaaccaacctttcgggaaaaaaaaaaaaggggttaaaatacaatttcggaaaaaccccttttttttaaaaaaaataaaaccggcccccaaaatcccaaaaaaaaatccccttccttttttccccttggaaaaaatttcctttttaaaggtatttaattttccccccccccccgggggaaaaaaaaaaaa

SEQ ID NO: 61660 - DNA, 325 bp, Homo sapiens
acttttttttttttttttttttttttttgggaaaaaatttttttttgttttttggaaaaaaaagggaatttttttccccggggagggaaaccccttttttttttgggggaaaccacccaggggccccctttttggaaatttggggggggccccaaaaaaaccctgcccggccttttttttgggaaaggcaaaaaccggccccccccccccccaaaaaaaaccccgggccgaaaaacccaaggggggggttttttttaacccccaaattgggtgtttcggggaccccaaaacaaaattttccatttttaaaaaatttttttttttt

SEQ ID NO: 61661 - DNA, 538 bp, Homo sapiens
actttttttttttttttttttttttttttaaaaacttttttttcccaaaaaatttttttttttggaaaaagcccccaaaaaaaaaccaaaaggggggtttttggggggaaaaggggttttttttttaacccccccctttttggaaaccaaggggggggggtttttttaaacccggggtttgggggttttaattaacccccaattgccccttgaaattgccccttttaaaaccccggggggaaaaaaaaaaaccccgggagggggggttttttcacttccccttggaaaatcggggggtttttttttttttccaaaaggggaaaaaaccctggggggggaaaaaaaattcccaaaaaaaaccgggttttttttttttccccccatcttttccttttaaaaagccttttggggggggccaaaatttttcccttctttggggggaaatttttgggcctttcccttaaacccaaagggcccccccccaaaaaaaaccccctttccattaattttttttcccgggttccttgcgggggggggg

SEQ ID NO: 61662 - DNA, 295 bp, Homo sapiens
acttttttttttttttttttttttgaaaaaaaagggtttttcccggggggttaaaaaacccggggttaaaaaaatccccccccctggttttccaaaagggttaaaattaagggttaaaccccttcccccgggcaaaaaaattttttttttaactggggtttttaaaagcccacttttttaaatttggggcctaaatttttttttccggggggggtttttttttttttaaagggttttggaaaactttttgggtttttgctaaataaatttaaacacattttcccccccttatttt

SEQ ID NO: 61663 - DNA, 256 bp, Homo sapiens
actttttttttttttttttttttttttaaaaaaaattttgtttttcccccccgagagaaaaggcggggggggaaaaacaccaacttaacccccccccccccgagggaaaaaaatttttttgccccaatctcccaaaaaggggggaaaaaagggccttttttaaaaacccaaattatttttttttttttaaaaaaaaacccccctttcccccccgggggggctttaaaaaaaaagggaacccccggggcgggaaaaa

SEQ ID NO: 61664 - DNA, 272 bp, Homo sapiens
acatttttctacatgtatatttggatctgacaagttaagtctacagttacttttgtgaagtttgcttccatgaaccctttcattttctccttttagtagtcaaaggttagaagtaaataaaattttttttggctctttactactttgttacctgagcagttttcagaaagtttatttattccaaacttaaggaatgttctctgtgtccaattcagtttggacaaaatacattttggggagaaaaatatgcaatatatttcttgctttctttg

SEQ ID NO: 61665 - DNA, 281 bp, Homo sapiens
  misc_feature 214: n = A,T,C or G
actttaaacttttcagttttttaaaactttctgattcttgtataataacttagattaaaacacaaacattgtataggtgtataaaaacattttctttatatccttattctgtaagcttttttctatttttaaaagtttttggctgggcgtagtgggtcacacctgtaatcccaacacttcgggaggcttgagatgggaggattgcttgaggcangagttcaagaccaaacttttttttttaaagaaaaagaaaaaaaaagtttttattttttgctttttaa

SEQ ID NO: 61666 - DNA, 290 bp, Homo sapiens
acgatattccatacacataaaaacactttttacataaataggatctcatattctgtagctttttaaaattttggtctcaaaaaaagaaacaggtctttaaatttctttaatggttgaatatgattaaatactatgaaaatgcccattatttatccccttaatttttttcctctcgctattacattgccaaagtaaacatcctatacagatgtctttgtgcatgtgtgtgaatatttctttagtctggagtccagtaaggtggatttttggatccaagggtttgttctctg

SEQ ID NO: 61667 - DNA, 437 bp, Homo sapiens
tccaccgcggtggcggccgagtactttttttttttttttttttttttgggggggttttaaaaaaaaaaaaggtttattttttttccccagggtttttttaaaccccgggcccaaagggatttttaaccccaaccccccaaaaggggggggattaaaaaaaaaaacctttgcccccagcccggaatttttttttttaaaaaaaaaaaaaaggggggccaacctaaagggccccaaaaaaaaagccgtttttttaaaaaaagggttttttaaaaaaaaaagtttttaaccccccccccaaaaaccccaaatttttcccaaaagggaaacctaaaaaaataaattttcttttttttcccggaactggccccttgggtaaaacccaacgttttttggtttttccccgcccgggggggccttttaaaattaggggacccccc

SEQ ID NO: 61668 - DNA, 299 bp, Homo sapiens
acaatcttggctcactgcaacctccacttcctggggtcaagtgattctcctgcctcaacctcccagtagctgggattacaggtgtgcgccaccacgcctggataattttttatttttttttttttttttaacaaaaaacaaattttattaacttaaataaggttggttttaaactcttaacctaaagtaatccttttttttaaccttccaaaagtgttggaattacgggtgtaacccaccaccttaaaacattttaaaatttttaagggtaaaaaattaaaaaaaaaattaatttaggg

SEQ ID NO: 61669 - DNA, 292 bp, Homo sapiens
actttttttttttttttttttttttggggcggttggggaaaaaaaaaaaacttccttttttttccccccaaaattggaaaaaaaagggggggtttttttaacccagggggaccgccccccaaattaaaattttttggccggacccccctttaaaggcccttttttttccaaaaaaaacccccccaattaaaaaaaaaaaataaaaaaccccccttttttgcccccaggggttaacccaaagggaaaccttttttttccccattgggggtccccccccggcccaatttttaaa

SEQ ID NO: 61670 - DNA, 149 bp, Homo sapiens
  misc_feature 17, 20, 23, 25, 26, 30, 37, 38, 43, 45, 50, 108, 109, 135: n = A,T,C or G
acgatgtctagtgatgnagnttntnngctnaattacnnaatgncncagtncaggccacctacggtgaaaagaaagatgaatcctagggctcagagcacctgcagcagnnatcatttcatattttgcttccgtggnagtggtgggcggag

SEQ ID NO: 61671 - DNA, 539 bp, Homo sapiens
acacgtgagagtgcatactggagagaaaccctataagtgtaaagaatgtgggaaagcctttagtagaatcagttactttcgaatacatgaaaggactcacactggagagaaaccctacgaatgtaaaaaatgtgggaaaactttcaattatcctctagatttgaaaatccacaagagaaatcacactggagaaaaaccctatgagtgtaaggaatgtgcaaaaaccttcatttctcttgagaactttcgaagacacatgatcacccacactggagacggaccttataaatgtagggactgtgggaaggtgttcatttttcctagtgcgttacgaacacatgaaagaactcacactggagagaaaccctatgaatgtaaacaatgtggaaaagcctttagttgttctagttacattcggatacataaaagaactcacactggggagaaaccttatgaatgtaaggaatgcgggaaggcctttatttatcccacaagctttcaaggacacatgagaatgcatactggagagaaaccctata

SEQ ID NO: 61672 - DNA, 333 bp, Homo sapiens
acttttttttttttttttttttttttcccaaatgggttcccccccccccccccaaaaaatttttcctttttgcggggggttaaaaaaagggcttaactggggttaaaaaaaaccaatttcccccggggaagggatttaaggggtttttaaaccccctggggtaaattttttttaaaaaaaaccccctcaaatttttttaaccccccccaatttttaaaaaaaactttaagggggtaaaacccccttttttttaattaaaaaacctgccccctttttggggaaaaaagggggggctgggaacccttttttcaaattttttttaaaaacactttt

SEQ ID NO: 61673 - DNA, 274 bp, Homo sapiens
acttttttttttttttttttttttgggttttttttttttttttttttttttttgggggggctcctataaattttttttttgggggagaagaaagacacccccctattccccaaaaaaaaaaaaacaaacacccccccccatataaaattatttttcccctataaacccccccttttatataagaagggggggggcccaaaccattataaaaccccctttttaggggagaaaacccccccggggtcctccccccgggggggggggaggggggggg

SEQ ID NO: 61674 - DNA, 289 bp, Homo sapiens
acttttttttttttttttttttttgggtttttttttttttttttttttttttttttaaaaaaaaagggttttaaaaaagggggccccccctttttttaaaaaaaaggttttttgggggttttcccccaaaaaaaaaaccttttttaaaacccttttttttcccttgggggggggggaaaaaaggggggaaacccaaaaaaaaaaaacccctgggggggggggaaaaaaaacggggggttttttaaaacccgggggggttttaccccaaaaaaaaaaaaaggggggccct

SEQ ID NO: 61675 - DNA, 544 bp, Homo sapiens
actttttttttttttttttttttttttggggggaaagggttttttttttttcccaaaaatggttttaaaattttgggggtaaaaaaaaccccccccccccccctttaaaaaagggggttttaaaggggggggggcccccccccggcccctttttttttaggggcctttaaaaaagggggttaaaaaaacccgggaaaaaacccaatttttcccaaaaaaaaaaaaatttttaaaaaaaaattattaaccctggggggcttttttaaactttaaaaggggaaaaaaaagggaaagtttttccccccccccaaaaaaattttttttcttttccccaaaaccttttttccctttttaaaaaataaatttccccaaaagggggttaaaatttggaaaacaaaaaaaaccacaaaaacaaaaaaaaaaaacccccccaaaaaaaaacccccctttttgggcccccaccccaaaaaaaaaaaaatccccaagggggggtttttcccccaatttttgaagggcccaattttaaaaaggggttttttttttt

SEQ ID NO: 61676 - DNA, 312 bp, Homo sapiens
  misc_feature 55: n = A,T,C or G
tccaccgcggtggctcgagcggccgcccgggcaggtacctgctgggatccctggnagaagaatatgcaagggaataagattgttcctctccctgtgacctccaggggcttcataatattttaccaacccacatttatgctgcgccaatttgttacctgttttagctgaattattctttctggtatcttctcataacatctacccaaagaaagtagatgcttgggtccgtctatccctgcagatgcctgactctttttatattttatccttattagccaccctacaagctcagctctctgatgggttcaagaa

SEQ ID NO: 61677 - DNA, 287 bp, Homo sapiens
tccaccgcggtggcggcccgagtactttttttttttttttttttttttaagggcgccccttccctaaaaattttttttgggaaccctttacccttttaaaaacttttaaaggggttcccctttttggccattttccttaccccaaaaaccaaccttggggttcttttttccagggccaaaaaaaaaggggaaaaaaaaaaaccctaaaaagaaagggggtttcctggcccccccctttttacccctttaaaaaaaatgaaccaattttttttttgggggaaaacccc

SEQ ID NO: 61678 - DNA, 168 bp, Homo sapiens
actttttttttttttttttttttttttttttaaaaaaaaagggtttttttttttcccccggggggttttaaaaccccaacccaaaagtttcccccccccttgggcccccaaagggggtgttttagggggtaaccctttaaaagggggcaatttttttttttttttttt

SEQ ID NO: 61679 - DNA, 241 bp, Homo sapiens
actaacaactgcaccttaagccactgaggaaatcacagacactgctgacacttataacagctgaagaaataatatgtagattacactactgcaaacaccctgaattgaaaccaaaatgtcctgcccaagcaacatcatagataatatgtttaggaaaaagttcttccctacaatagcaaaatcaaaaatttgaaaaagtgactgtcacagccgatgcagagatagcaatataacaacatac

SEQ ID NO: 61680 - DNA, 235 bp, Homo sapiens
actttttttttttttttttttgaaaaaggggttaaaccgggcccctaaggggggggggcaacccccaaaattggggtaactggaccccaaaccccctggggtaaagggacccccccccccaaattccccaaggtgttgggaccccgggggggcccctttttttttttttttttttttttttttttttaaaaaaaaaaaagtttttttttttccccccgggggggggggggggggg

SEQ ID NO: 61681 - DNA, 556 bp, Homo sapiens
acttttttttttttttttttttttttgggggggggggggggaaccccaaccccttttttaatgggggggtttttttacccccccttggggggaaaaattttttcccccccccaaaggggtttttccaagggccaaaaaacctttccctttttggcccaaccattaaatttcccgggggttttaaggggttttggggccaaattaaaagggaaacaaaaattttttttgggacaaccctttttccccgggggggggggggtggcccccccccccaaaaaattcccccccttttttcccaaaaaaagggggggcccttttaaacttttttaaagaaccccccggggtttggggggttttaattttggttccccctccaaaattttttttttttaattttttttccaaaagggttggggggtcccccctctttttttttttttgccccgtacccccccggggggggcgtttaaaaaaaaggggaccccccgggccggggaaattttattttaatttttttaaaccccccccccctgggggggggcccggcccccctttt

SEQ ID NO: 61682 - DNA, 304 bp, Homo sapiens
acttttttttttttttttttttttggggaaaaaattttattttttcccccagggggggagggagggggggaaatttaatttaataaaccctttgcctaaattttttggggggggggaattaaaaattgcccccccccccccccgggtttttttttttttttaaaaaaaagggggtttaaacatttggggcggggtttttttaaacttctggccctgggggaaccccccccttttttttccccaggggggggtataaaggggggaacccacctgccggggaaaattaaatttttttttcccaaaa

SEQ ID NO: 61683 - DNA, 265 bp, Homo sapiens
actttttttttttttttttttttttttttagccccccttgaatttttttttttcaaatagggaaaaattggggtttaaaaaaaaaaatgggggaaaaatttaacccgggccccttttccccaaagggggaaaagggggccctcccgggggccccccccttccgggtaaaaaaaagggggccccccctaaaaaaaaaaaaaaagaatgggtttaggggccaaaaaattaccctttgggggggggaatttggggggggggggttttt

SEQ ID NO: 61684 - DNA, 281 bp, Homo sapiens
accccgtatgttatgtgagatgtgacacggggaaatgacgaagacacggagggaagaaaaataactgtaaggctgggtggctccttatggggaaaactggaagcatgaggagtggatggtgactggtcagaggaacagtgatgccaagggagggacaaagacacaaggggtaatgatgacgtaagagttgcattagcgcgatttaagaagagcgatggggacagtagccatgcgaaggtgacttgggggtatgatgagggtttaaagagaaatgaggattt

SEQ ID NO: 61685 - DNA, 424 bp, Homo sapiens
actttttttttttttttttttttttttttttccgcgggtttaaaaaaaggctttaacggggtttaaaaaaccccatttcccccggggttggggtttaaaggggttttaaacccccctgggttaaatctttttaaaaaaaacccccccaaattttttttaaccccccccccttttaaaaaaaacttttaggggtttaaaacccccttttttttaataaaaaacccccccccttttttgggtttaaaaggggggcctgggacccctttttccaaattttttttaaaaaccctttttccccccaaaaaaaacctttttcccccccccccttttttttaaaaacccttttttttttccccccccccccccccctttaaaagccttaattttttttttaaaaattttaccctttaaaaaacccgtaaaa

SEQ ID NO: 61686 - DNA, 422 bp, Homo sapiens
acttttttttttttttttttttttggaaaaaaaaagggttttccccttttgggccgggggggttttaaacccccaacccaagggaatttccccccccgggcccccaaaaggtttaaaattagggggaaaaccatttgcccccccttttttttttttttaaaaaaaaattttgggaaaattttaaagggaaaaaattttttaaaaaaaacctttttttaaaaaacaacccccttttccccccttaaaaaatttccccggtttttaaaaaactaaagggaaaaaacttttttaaatttccccaaggggtttaaaaccagggtttttaaaaaaaatttttaaaaacatggtttggccgggtttggacaaaaaacttttattttctaaaaagggttgggggggggggaaaaccctttttttaaaaa

SEQ ID NO: 61687 - DNA, 279 bp, Homo sapiens
acaggatttcctaattgttttactgatcaagatttatcctatccatggctccagcaaaggtatccttcaagccacacagggtctttgggagaaggctagatacctgaacaaaatcaggcttctcttttatgaaagttaaagggtaagagccggtgggtttaggctgggttgatagtcaacagctcagcaaatttgatgtgatcatgcattttaaaaacatgaatcagcaaattccaatcccaagaacactgctggagcattggttattttcctatctag

SEQ ID NO: 61688 - DNA, 294 bp, Homo sapiens
acttttttttttttttttttttttgggggggggggtgggggggaaaaaaattttttttccccccccgggtttgaggccaaggggggaattttaacttattgaaatttttcccttgggggtaaaaaaaaattttaccccttgcccccctgaattggggggattaaggggaaaccccccccccccggggtaattttttttttttaaaaaaaaaaggggtttcaccttttgggcccgccgggtttaaaaccccgggccaaaaaaaaacccccccctttggtttccaaaaggggggga

SEQ ID NO: 61689 - DNA, 258 bp, Homo sapiens
acttttttttttttttttttttttaaccccggggaaaaacccatttggccctggaaaacccctttcccccttaaaaaaccagggcccctttccccaaaggggaaactttttttgggaaaccccccaaaggaaccccccggggggggccctttttccctaaagggggaaaaaaaaaagggaactttttttttccaaaaagggtttcctttttttctttgggccattccttggaaaaagggggccctttggggggaacca

SEQ ID NO: 61690 - DNA, 406 bp, Homo sapiens
acatgatggtgaggctcacattgcaggagtcaaggaaccctctaaagaaagaggccacgactctgagcattcttgagatttctgtcaaactcaagctaaaatttcctcagattactgaagcgtttggtagatttctcttaaaaaccatattttgttcttttttcctcccactttgttggaccataataatcagtgcttggttatttgtagctgtgtgtagagagggtgctaaatgttttcttgtcatcccatgtaatttaaacttcacgccaggttaggtgtagctggttctgtctgcatttggccaaagaggaaactgagattcactgaagttaggcaatctgcccaaggccatagagctagaaagttctgcacctaagatttaaactcagaacttatagccagg

SEQ ID NO: 61691 - DNA, 289 bp, Homo sapiens
actgatgtcaaccccagtgtttcctcatttactgagcatgtgtgactttcaaaaggctctgttactctcttgatttctgtgaggagcgagatagccatgactttaccctgaccatgtgactggaaacatactgaatattattggatggagaagttcacagtgtttcacaaacacatgacaagttattgttaacattatatgaatgggaggtggcaggtcaagtaaggccagagaagcattcaagctgacaccttgttcatgaatttaatctcttatgagaacagctagc

SEQ ID NO: 61692 - DNA, 282 bp, Homo sapiens
acaaaacccttttgtaataatacggagaaggtatttacatttccctttgttgacatttgcactgatgctgcaaaagcaattgttggtaaaacttctgataccttagtatatgtcaaggcactggctacactggtagtcctggtgttcttcactgccaagtgttggcttcacaaataattcactgaagaatgtccttgatgaagcactaaaagtaatattattaaatcttgacccttggagacccatctttttaatattctgtgtgatgaagtgggatgtctg

SEQ ID NO: 61693 - DNA, 114 bp, Homo sapiens
tccaccgcggtggcggaccgaggtactttttatagaagaaaattggaaataagtaagttcagctgtaggggactggggtatgattgattctggtgatgaaatgtggtgatgtgg

SEQ ID NO: 61694 - DNA, 371 bp, Homo sapiens
accactgcactccagcctaggtagcagagcgagaccatctatgtctcaaaaaggaagaaaaaaaaattgatcctaaaatttgtctcatttgtgtaggatttctttcatttttctaagttgatctagatactaccattagagagcaataggacttacagtgaccacagtgaagatgtagctataagtttatgtgttcaatgtgctgttacatttctaacaattgagtcatgcactaaatgtttggagaccccaaaatcgtgtgtgaatttcttatgaattgaggatacctctcatccttgtcaatctcacctattctctacttatattggatgtttcaggactcagtggcttttggggatgtgtctgtgagc

SEQ ID NO: 61695 - DNA, 300 bp, Homo sapiens
accgtgggcttctggcacaccccatcattgctcctgccacatgactttccaatgcaaagccaaactgtaaagatttgaataaatagctactttttcaaatgcacagatatcaatacacagctacaaggatcaagaacaattacagaaacgtgacatcaccaaaaggacaaaaaaatttccagcgattgaccctaaagaaatagagatatattaactctctgaaaaataattcaaaataatcgttttaaggaaacttgacaataattataatatgcaacagaaatccttgaactgaaaagt

SEQ ID NO: 61696 - DNA, 229 bp, Homo sapiens
acgaaaggacaagagaaataaggcctacttcacaaagcgccttcccccgtaaatgatatcatctcaacttagtattatacccacacccacccaagaacagggaaaaaaaaaaaaaaaaaaaaaaaaaaggttttttttccccaaaaaattttttaatttatttttaaaccccctttttaaaaaggggaaaaaaaggggaaaattttttttttttttagggggggggggg

SEQ ID NO: 61697 - DNA, 504 bp, Homo sapiens
tccccgcggtggcggccgaggtactttttttttttttttttttttttttttttttccccgggaaaaaccttttttccccccccggggggggttaaaaaaccttttttttttttctcccctggggccttttttaaaggttttttttttttttttaaaattttgggctttaaaaaatccggaaaaaacctccccccaagcaattttttaaaccccctggggctttttttttaagggggggggttaaaccctttttttcaaaaaaaaaaaaaatttttgggggggttccaaaagcccccggggccccccaaaaaaaacccccggggggggggggcaaaaggccccccccggcccggggggggggggggtttaaaaaaaggggggcccccggggggggggggattttttttaaacttttttaaccccccccccccgggggggggggccggccccccctttttttcccctttaggggggggaaatggcccccggggggaaaaaggggga

SEQ ID NO: 61698 - DNA, 153 bp, Homo sapiens
aaattttaaaaaaaaccccttgtttaccctttaaaaatgggggggaaaaaaaaaaaaatattattttggccccttttaaacattttacaaagtttttaaaaaaaccattttaaaagggggtttttttcctttaaaggccttaactttattggg

SEQ ID NO: 61699 - DNA, 170 bp, Homo sapiens
acttttttttttttttttttttttttctaattggaaaccgggaaaaatttatttttttaaattaaccttttaaggggttaaaaggggcccctttgttaaacttttttatccccaccttttgggggggttaaaacgggggatcccccgggggcaaaaatttaaaacccccc

SEQ ID NO: 61700 - DNA, 273 bp, Homo sapiens
actttttttttttttttttttttttttaaaaagggtttttttttttcccccagggtggaattttagggggtaaaaaaaatttaaaaaaaccttaatttccccaaacctaagggaaccttctaccttttaacctccaaaaaattgggaattaagggcaaatcccgccaattttggctttttttttaaaaaaaaaagtttttccttttttcccaaaatgggtttaaatttctgaacttaaaaaaatttttttccttggccttttaaaaccctggg

SEQ ID NO: 61701 - DNA, 305 bp, Homo sapiens
acttttttttttttttttttttttttttgttttttgtttttcccaaaaaggggtttttaaaaaatttttgaagggccaatttggcccctttttttttttttaaaaaaaaattttttgggaacaggggcccccccctttttttaactttttttataaggtttttaggggcccaacggggaaaataaaattattgaaaaaaaaacctaagggcccaagggggaaaaattttccccctcggccttattaaaaaaaaaggggggcccccctcttttaaaagaaatttttttctctttaaaatgttttta

SEQ ID NO: 61702 - DNA, 477 bp, Homo sapiens
actttttttttttttttttttttttgaacccccgggtttttttaaaaaattttttttgaaaaacccgttttcccccttttgccccgggggggttaaaaacccggggcttaaaaaaatccccccccttaacccccaaaaggggggggatttacggggttaataaaaaacccggggcaaaaattaaccttttttttttgccctttttttggaaaccaaaaaccccttttgggggtttttttaaaaaacccctttttcccaaagggggaaagggggaaccaaaatttaagggccctaaaaaccttttaaaaaaagggtttccaacccctttttttaaaaaaagggttttttttttgggccccttcaaattttttttaatttgggggaaaaaaagggggaaatttcccctttaaaatttccccttctaaaaaaagggccaaaacccggctggggttttttgggggaaaacccccccttttt

SEQ ID NO: 61703 - DNA, 298 bp, Homo sapiens
actttttttttttttttttttttttttttttttcccgacgcttggggggctccctttattaagcgccccggttttttttcgccttttttttgattccccgtttcccccgtttttttttaggttttaaaaagagggccccggttttttaaaaaccctactttttttttttggtttcacaaggggtttcctcctatcctttcttttttcccccatatatttttgggggttatcccccgggctcccgctttttttggggaaaaaaccccgggggggggggggctttttccccgggggccaa

SEQ ID NO: 61704 - DNA, 503 bp, Homo sapiens
cgcggtggcggccgaggtactttttttttttttttttttttttttggggggaggggggggaaacccaaaaccccttttaaaagggggggcgctttaacccccaccaggggggaaaaaattttaccccccccaaaaagggttttccccaaggccaaaaaaattttccttcggtggcttaaacggaaaaatcccagggggaaaaaaagggttccggggccaaaataaaagggaaacaaaaaattggggggggaacaccccccaaacccagggcggggggggtggccccccccccccaaaaaccccccccccttttgccccaaaaaacggggggcccctttaaccctttttaaaggccccccccggggtccgggggcctaacccttggtcccccccccaaaattttttctttttatttcctttccccaaagggaaggggggaccccccccccttaacacccgggggaaaaatttttcattttcccctggggggccccgcccgggcg

SEQ ID NO: 61705 - DNA, 321 bp, Homo sapiens
tccaccgcggtggcggccgtcgccggcagcaactcgggaggctgaggcaggagaatggcgtgaacctgggaggcagagcttgcagtgagccgagatcgcgccactgcactccagcctaggtgacagagcaagactccgtctcaaaaaaaaaaaaaaaaaaaaaaaaaaagccccccgggccctttaaaaaaaagggggaccccccgggggggggaaattttatttaaaattttttaaaccccccccccccgggggggggccccgccccccattttttttccttttaagggggggaaaatgccccccggggaaaaaaagggg

SEQ ID NO: 61706 - DNA, 533 bp, Homo sapiens
actttttttttttttttttttttttcccaaaccaaaaaataaaaatttttcccccaaacccaggggaagggggcccctgtttaaaaaattttttttaaaaccccccccggggggggagcccccccttttggggaatttcaaaatttacccaatttttttttttgccctttccccggccctaacctttttttttggccccccttttcccttgttttaaaaacctaaggtttttcccccccggaacccggaaaattttttaggggcccccctgggttttacgcctttactggccccggccctaaaaaaatcccttttctttcccccccgtttaatttttttctaaaaacccttaaatggttttcaaaaaggtttttttttatttaaaaacccggttacccaaggggggggttaaccttttattgtacccctttaaccaaactttttataagggggccttttaatccctccttttaccaaaaataaaaaccgggttttttaaaaaaacccttaaaacttaagaaaggccttttaaa

SEQ ID NO: 61707 - DNA, 334 bp, Homo sapiens
tccaccgcggtggccggccgcccgggcaggtacaactcctcttttttttttttttttggggaattttaattggccccaaaaaaaaaaattttaaacccctccttattttggaagggcgggaacctcttttaaaaattggaacccccttttttttttaagaaaaatttttttgggggtttggtttgttggggtttttccccgcctttaagaaaaaaaaaaattttttgcccccctaaaacccttccttgggaaaaaaccttttttggatttttgtttgaaaaatccttttaaaaaaaaaaggtaaactttaaccacccccccggtttaatttttt

SEQ ID NO: 61708 - DNA, 313 bp, Homo sapiens
actttttttttttttttttttttgggcccttttttaaaaacaaaaaaatcccccccccttaacctttaaccttcccaaatttttttaaaaaaggggttttttttaaagggttttaaacttcgggttttttaaaataaaacccaaaaattttttaaggggttttaaaaaaaaaaaaaaaggcttctttttttaaaaaaacatttttcagggggggggaaaacccaaaatttttaaaaccccagggaaaatttttttttttctaaaaacccccttttttaaaaaaaaaaaaaaatttttttccccccccaaaaaa

SEQ ID NO: 61709 - DNA, 248 bp, Homo sapiens
acagatcagaggcaaagcaagagaaagaagcagaggctattggcccaggctgagaagaaagctgccagcaaaggggatgtccccagtaagagaccacctgtctttcaagcaggagtcagcacttcaccaccttggtggagaacacgaagactcagctagtggtgattgcatatgacatggatcccatcaagctggttgtcttcctacctgccctgtgtcgtaaaatgggggtcccttactgcattatc

SEQ ID NO: 61710 - DNA, 147 bp, Homo sapiens
actttttttttttttttttttttttttaaaaaaaaaacaagcggacccctgggggttgcctaaaaccccctttgggggggccaaatccccccctttttgggaaaaattatattgcacccgggccttaaaaatggggggagggggggg

SEQ ID NO: 61711 - DNA, 297 bp, Homo sapiens
  misc_feature 6: n = A,T,C or G
actttnttttttttttttttttttttttaaaaaccccctttgggggcttcccttttaaaacccttttttaagggaccccaaaacccccccccggttttattttttgggggggggggccccaaaaaaaaaaacccccaacctttttttttttttttttaaccaaactttgggcccaaaaaattttccccctttccaaaaataaaattttccccttggggaaaaatttttcccccaaaaaaaaaaccccctcccccccttttaagggcccaaaaaaagggttttccccctttttaaccc

SEQ ID NO: 61712 - DNA, 301 bp, Homo sapiens
acttttttttttttttttttttttccccttggggcctttttttttaagggggggggaaaaaaattttaaaaaagtttttgcccccaaaaattttttttttttcccttgggggggggggaaaaaaatttttggaaccccccggggtttgcttttggaaaaactaaaaagaatttccccctttggggggcctttaaggggttttgggagggaaaaacccccccttttttttaaaaaataaaaattttttttttgggaatttttttgacgggttttttggaaggggggggcttaaggggggttt

SEQ ID NO: 61713 - DNA, 238 bp, Homo sapiens
  misc_feature 215: n = A,T,C or G
actttttttttttttttttttttttttaaattttttttttttttttaaagggggaaaaaaaaacccttttgggggccccccaagggcccaaatggggggggggggggaaaaaaaaaaggggggggcccccccttttggggggggggtttttttttgacccccccaacccccccggggggggcccttaaagggggaaaatccccccccgggggggngggtttaatggggaacccccccc

SEQ ID NO: 61714 - DNA, 385 bp, Homo sapiens
acttttttttttttttttttttttaaaaaaaaattttcttttttcccccaaattggaatgcaagggggttaacccggtttaaccaaaccttccccttccgggttaaaaaaattttccccccttaaccccaaaaataaccggggccaaaggggccccccaacccccccaaaaaatttttttttttttaaaaaaagaggggtttccacattttggccagggtgggttccaaaatcctaccctgggggacccattttccttggcccccccaaagggtggggttaaaggggttaaccaaaagccccgggccttttaaaaataagggaacccccgggcttgaggaatttaaatttaaattttttaaaccccgccaccctgggggggggcc

SEQ ID NO: 61715 - DNA, 261 bp, Homo sapiens
acttttttttttttttttttttttttaaaaatttttttttaaaagagggaaatttgttggaattcccttgtaaggcccaataattttgggaaaaattgggggggttttttttttcccacccccccttttttttttccctttttaaattttggggatttttttttttggggggaattattttccccttggttaaaattaaggtttaagggggtttttggccccttttttggggggattaaaaaccctttttttttttaaaat

SEQ ID NO: 61716 - DNA, 271 bp, Homo sapiens
acttttttttttttttttttttaagggcgtacctttccaaaaatattatcttgggaacccttttcccttttaaaaacctttaaaggggttacccccttttgccaatttccctataccaaaaaccaaactttgggtccttgtttccaatgcctaatgaaaaatggggaaaataaaagacctaaaaataaaagggaattccatgcccctcccctttttaccttttataataaatgaaacaattttattttttggggaaaacccccccagccaa

SEQ ID NO: 61717 - DNA, 389 bp, Homo sapiens
acttttttttttttttttttttttttttaaccaaaaaaaacttttttttcctttggccccagggtttttaaaaaaaaaaaaaaaaccccctttttggtgggggggaaggttttagcaaaaccccttttttttttgagggggccccttaaaaaacccggggcccaaaagggcttttattccccctggggggggaccttttaaaaaaatttttccccaaccccctcctggggccccccaaccttgggggggtgggccgggggccccccctttttttggaaaacctcccctcccttttcaaaaaagggcttccccgggaccccccagcctttaaaaaaaaggggaaaatttctaccccccccccctttgaaaagggggggaaaaaccccccg

SEQ ID NO: 61718 - DNA, 294 bp, Homo sapiens
tccaccgcggtggcggccgggtattatgtgcccatcactgtttggggtgcttggtgcgtgacatcttcgtggcttgccaatctcgtgaccccctgcagttgccgcagttttctgccttttcctcagtttctctgcctttttctcaaccttcctctcccacatggccttcgttcagactctcccttcagctactcctcccctccctaacgattctgaaaattcgatttctaactctggtaactttggcttaaagttaccccctacttttcttacttcttcccacgaaaagccggt

SEQ ID NO: 61719 - DNA, 248 bp, Homo sapiens
actttttttttttttttttttttttttttttttttttttaaaacccccccccccctttttttgggccccccgggaaaaaaccccctttttttaatttccccccccgaagggggggaaaaacccccccccccaaaaaaaggggattttaaaaaaaaattttggaaaaaaaccccctcccccccccctttggggggggggaactttttaaggcgggggggccttaaaaaaaaaaaacccaaaggtttttt

SEQ ID NO: 61720 - DNA, 339 bp, Homo sapiens
  misc_feature 1, 37: n = A,T,C or G
nccgcgttcatggtacatatctgttggcctgaatggnagctccaccgcggtggcggccgcccgggcaggtacattcttctctgccaccctcttgagaggacagctgtgattacattattggacccacctagataatccaggataatctttccatctcttcacctttgctttaattatatctgcaaaatcccttttgcaatataagataagatattcacaggttccagggactaggttgttgacatcttcagaggtggagaaggatattattcagtcaagcacaccaggcaaggcattctataccaatcagttatttgccaggtgacttcagttacatga

SEQ ID NO: 61721 - DNA, 305 bp, Homo sapiens
actttttttttttttttttttttggggggggggggtgggcccaaaaacccccccttaaaaatttttttttttggcccgggggggtttaaaaaatttttgggccccctttttaaaaaatccctccccttgaaaaaaaaaacctttttacccccggaaaaatttttttttttttttaaaaggccaaccctttttttttaaaaaaaaaaggggcccctgaaaattttttcctttaaaaaaatttttggaaccccccaaaaaaggctttttttcccgggggggggccgccctttttttttttttaaaaa

SEQ ID NO: 61722 - DNA, 296 bp, Homo sapiens
acttttttttttttttttttttttttggcccccccccaaaacttaaaagggggaattggggggggaaaaaaaaatgcccccaaaaaaaattttttaaaaaaaaaaaaaacggggggggtttaaaaaaacattttgggggttttttttttttccccccccgggggggggggcccaaaattaaaaaattttttttttggggaaaaaaaaaatttttttttttgttttcccccccttgggatttgggggaaaaaattgggccccgggggaaattttttttaaaaactttttttttttta

SEQ ID NO: 61723 - DNA, 288 bp, Homo sapiens
  misc_feature 27: n = A,T,C or G
acttttttttttttttttttttttttnccccccaaaaaaagaacccaggggggcccccaaaaaaaaggggggaaccctttttcccctggaacaatttttggggggccaaaaaatttcttttttaaaaaaattggggggggccttttttttgcaaaagacttttttttgggggggcccaggcccacctttaaaaagggaaatttttttttttttttttaaatcccccggggaaaaccacttttttcctttcccccaaaaaaaaaactccctgggggggggggttttttt

SEQ ID NO: 61724 - DNA, 530 bp, Homo sapiens
  misc_feature 88, 89, 90, 91, 92, 93, 94, 95, 96, 97, 98, 99, 100, 101,102, 103, 104, 105, 106, 107, 108, 109, 110, 111, 112, 113,114, 115, 116, 117, 118, 119, 120, 121, 122, 123, 124, 125,126, 127, 128, 129, 130, 131, 132, 133, 134, 135, 136: n = A,T,C or G
  misc_feature 137, 138, 139, 140, 141, 142, 143, 144, 145, 146, 147, 148,149, 150, 151, 152, 153, 154, 155, 156, 157, 158, 159, 160: n = A,T,C or G
acttttttttttttttttttttatattttttttttttttttgattttttttttttttattttttttttttttttttttatctttattnnnnnnnnnnnnnnnnnnnnnnnnnnnnnnnnnnnnnnnnnnnnnnnnnnnnnnnnnnnnnnnnnnnnnnnnnaaaaaaaaaaaaaaaaaaaaaaaaaaaaaaaaaacacccccccgcggcccaaaaaaaaaaaaaaaaaaaacaaccccccccccccccccccccggcggccccccccccccccaccacaacccgaggcccgaccccccccccccccccggggggcccccccccgcaaaaaaagagagggaggccgcccccccccccagccggcgttgttttaagaaaagagggaaaggacagccacaaagaaaaaaaaaaacccccccccggggggggggggggagaaaaaaaaaaaaaacgcccccgggggagaaaaaaaaaaaaaataaaaagccgcgcgccgggggggggggggggggggcccgcatatttttttttt

SEQ ID NO: 61725 - DNA, 223 bp, Homo sapiens
acttttttttttttttttttttttttttaaaggatgtatttttttttttttttttttttttcccgcccccccggggagggcaccccaaaaaagactttgatgccagagaaaaaaaaaggggtctgatagccaacatagacccgctgtaaaaaaaaaaaagaaaaaaaaaggggttcttccacacggggtaaaaaaaaaaacccccccccccaagggggggggg

SEQ ID NO: 61726 - DNA, 420 bp, Homo sapiens
actttttttttttttttttttttgggggaagggggggtaaacctaaacccttttttaaatggggggcttttttaagcccaacaaggggggaaaaatttttaccttttttaaaagggtttttcctaagggccaaaaaacctttcctttttggaacaaaaattaaatttaaaaggggaattaaaaggtttttggggccaaattaaaagtaaaaaaaaaattttttttggaaaaaccatttttaacaaggctgggagggttggccccctcacccaaaaaatttcccaattttttgccaaaaaaaagggggggcctttttaaccttttttaagaaaccccctggggttcggggggtttaaccttggtttccccttgaaaatttttttttattaatttctttttccaaaaggtttgggggtaacc

SEQ ID NO: 61727 - DNA, 277 bp, Homo sapiens
acttttttttttttttttttttttggggggggcccccccccccctttaaaatgggcccccccccccaaaaccaaagggggtgccctttaaaaaccccgggtttttaaggggggggtttttttttttttgggaaaggggaaaaaaaatttggggccccccaccaaattttttttttttttgttccccaaaacgggggccccccccccaattttttgggggggccaaaatttaaaaaaccccggaaaaacccctcccctgaaaaggggggggggggggg

SEQ ID NO: 61728 - DNA, 465 bp, Homo sapiens
actttttttttttttttttttttgggggggggggatttaaccttaaacccttttttaattggggggtgtttttaccccctcttgggggttaaaatttttttaccttctcacaaagggtttttcctaaggcccaaaaaacctttcctttttggaccaaaaataaaatttaaaagggggtttaaagggttttggggccaaattaaaaggtaaacaaaaatttttttttggaaaacccattttccccgggcccggggggtttgcccccctcccctaaaaattcccccaattttttgccaaaaaaaagggggcccccccccgttccctgggccctttaaaaaaaaagggaccccccgggccgggagaattttattttaacctttttaaacccccccaccctaggggggggccccggccccaattttttttccctttaaagggggtaaattccccccctgggcaaaaaaa

SEQ ID NO: 61729 - DNA, 292 bp, Homo sapiens
ctccacccggtggcggccgaggtactttttttttttttttttttttttttggaaaaggggtccccccgttttacccgggggggttgaaaacccgggggtaaaaaaaacccccctttgccccccaaaagggggggaaaaaaggggaaaaaccctttttgggggaaaaaatttttttttttttcccccaaaggggggccccccctttaatttttttcaaacttttggaaaaaacccaaaaacaaaaccccccctttttcaattttaaaaaaaccttgggggaaggttttttttt

SEQ ID NO: 61730 - DNA, 346 bp, Homo sapiens
actttttttttttttttttttaaaaaagggggttttgttggtcccttcagccggaagtgtatccagggccttaaaaagggttatttgcacccttaaactccggggttaattaaaccttcctccctaaccctcttaataactgggaacaaaagggccttccccccttcccgggtaaaattttaaaaaattttttgaaaaggaaaggtttttttaattaccccaggtgggtttaaaaccccgggcctaatacggggttttaaagggcctaattttttaaaaggggtttagggtttccaaaaaattttgggggaaaaattttttacccccccttccttttgcaaaaaaa

SEQ ID NO: 61731 - DNA, 304 bp, Homo sapiens
acgcgggaatagtggaggtgttggagcttttccctggggttttattttgttaattgtgaataccatttagtttactacagaccttatcatttcatttcccccagtcagttagagggagttagagtaggtgaatctaggtgaaatcaaaggaaccttccaaatcttaatgttttaattctgtggttgtattattagcacttttggaaccaagtttcagcttggatttggtttagagaagtgaaatcgttatgtagaaattacttttaaaaataaactcttgccaggtggcctaaaactcgacatg

SEQ ID NO: 61732 - DNA, 393 bp, Homo sapiens
actttttttttttttttttttttttatttgctttttgggggaaaaaaaaaacttaaaacaaaaagcccccacttttttttttgccttctttcccccagggaaaaaggtttttgggctggccaatacattcaccaaccttgaaaattccccccgcctttttgggctaaacggggcccccaagggggccccttccttctgggggatgaaacccaaaaaaccccccttgaggggctaaggcaaattttttttttcaaaaaaaaaaacaccccaaaaattctaaggggaattttttaaacccccctttttttccaaaacaaaaaatggtgggcccaaaatttaaggggttttattaaaaaaatttcccggggcccttttttttttttgggggggggg

SEQ ID NO: 61733 - DNA, 352 bp, Homo sapiens
cccgcggtggcggccgaggtacttttttttttttttttttttttttttttgggcccttgggaaaggggggggggggtatttttgttaaaaattttttagggggggaaaaaaaaaattttaaagggttttgggggaaatttggggggccccccccgggttttttttgggggcccttcccattaaaaagggggggggtcctttaatttttaacccaaaaggggtaaccccaattttccttccccggggcccttaaaggggggaaggggggccctttaagaaaaaacccccccctttttaaaaattttttgggggaaaatatttttaggccaaggggccaaaaactggggtttcc

SEQ ID NO: 61734 - DNA, 258 bp, Homo sapiens
acagtggaatgaaacggaatgtaataaagtagattggtgtggagtggaattgagtggagtgcagtggagtgcagtgaaatggaatgcaacggaatggaatggagtggagttgagtggggtggaatggaatgaaatggagtggaacaacccgaatggaatggaatgtaatggagagtaagggagttgaatagaatcaatccgaatgtaatggaatggaatggaacggaatggaatggagtggaatggaatgggatgcat

SEQ ID NO: 61735 - DNA, 244 bp, Homo sapiens
acttttttttttttttttttttccaaaatttttccaaaggccgtcccctttcttttttttgggggaaaaaaaaaaggggggggggggaaaaattcccttatttaacccaaaattttttttggaaaaaaaggggggggaaaaagggggggaatcccccccccggggtttttaaatctcccccccccaagacccctccctttttttttaacccaacccctttcccccccccaaaaaaacctaaacc

SEQ ID NO: 61736 - DNA, 308 bp, Homo sapiens
acgcgggtaaaacagtctttattccagcttgttaaaagtgggaatgccgtaaaccaacacagtgagcctggagcaatgacaagctacacaaaaattaaacatatttgtatttcaagatgtagcgagctgtcgtggccagttcatggccactttgggaagacatttattaggaggaagcaagatggcactaaagcgtgggagaggacagaagctggagccgtcatgggtgcagaataaggctggcccggaagagtggctgggtggggtcacacctggtagttcagatatcttttgctatcgattttcta

SEQ ID NO: 61737 - DNA, 222 bp, Homo sapiens
acatcgtgtgaaactcctggaacaggtagaccaggctctcttgggtgtgctgcagtgtggtggcatttgacttggagtcttagtggatgaaagtgcatgaggttaactatatcaccttctgtctacagaaggaaatgctatgtttattctacctgtaaaaatattgaccgcagtaaaatcagcagttaggaatgtatagaaataaagaagtttacagttctg

SEQ ID NO: 61738 - DNA, 302 bp, Homo sapiens
acttttttttttttttttttttttttttttttttaaaaacccccccttttgggggtaaccgggggggaaaaaaaacctttgggggttatttaaaaatttgggcctttaatttccaattcaattttttaattccccccccctttttccggaaaaaaaattttttttttttcttaaaccaaaaatttttttttttaaggggaaaaaaatgcccccatggggggggaagaaaccaatttttttttggggattttttggggggggggggttaaccccaaacccctttttaaatgggggggtttttt

SEQ ID NO: 61739 - DNA, 305 bp, Homo sapiens
ctccaccgcgtggcggccgcccgggcaggtactttttttttttttttttttttgggggggaggttttttttttttttttttttttttttttcccttaaatataaaaaaaaaattttttttttttttaaaaaaagtggccccctccgggcgccaaaataattccaagggcccccaaaaaatttttttttgggggccccccctaaaaaatttcccccttaaaaaaaaaaaaaaaagggttccttgggttggggggggacttttaaatttttttttttttttttggggggggccttttttgggggggc

SEQ ID NO: 61740 - DNA, 470 bp, Homo sapiens
  misc_feature 299: n = A,T,C or G
ctccaccgcggtggcggcgcgggtgcagtggctcatgcctgtattcccatcactctgggaggccgaagcgggcagatcatgaggtcaggagtccgagaccagcctgcccagcatggtgaaaccccgtccctactgaaaattcaaaaaattagccgggcatggtggcacacacttgtaggcccagctgcttgggaggcagaggcaggagaattgcttgaacccagcaggtggaggttgcagtgagccgagattgtgccactgcactccagcctgggcgacagagtgagactccatcgcanaaaaaaaaaaaaaaaaaaaaaaggcccccggcccctttaaaaattaggggacccccggggctgggaaaattttatttaactttttttaaacccccccccctggggggggggcccggccccccttttttttcccttttaaggggggtaaatgcccccctggggaaaaaaggg

SEQ ID NO: 61741 - DNA, 278 bp, Homo sapiens
acttttttttttttttttttttttggggccttttccccttttggcccccggccctttttaaaaaattttttttttccccaccttaagggattttttttgggcccaattaagtgggaaaaaaaaccttttgggggggaaaaaaaaaccccatttttttttttttttttttgaaaaaggggggggaaaatttttcccaaaaaccaaaaaaaaattccccccccaaaaaagggggggttttttttaaaaaaaaagggggttttttccccttttttaaaaaa

SEQ ID NO: 61742 - DNA, 303 bp, Homo sapiens
acttttttttttttttttttttttggtgggtgttttttttaaaaaaaaaaaggttttttttttttccccggggtttttttaaaccccggacccaaattgtttttttaccccccccccccaaaaggggggggattaaaaaaaaaaccctttgcccccccccctgattttttttttttaaaaaaaaaaaaaagggggttcaacctaaaaaccccccaaaaaaaagcccttttttttttaaaaggtttttttaaaaaaaaatttttttatccccccccccaaaaaccccaaatttttcccaaaagg

SEQ ID NO: 61743 - DNA, 564 bp, Homo sapiens
agctgtttcctgatgtaaaacaacaagaccaccattcctgtccctctgtttattcttgggttgaacaaggtatcaattctccctgatttaagctatgagggttgcatttttccaggattgtattcatctcttttaggtcttctagtttatgtgcataaaggtgttcatagtagccttgagtaatcttttgtatttcagtggtgtcagttgtaatatctcctgtttcgtttcttagtgaggttatttggattttctctcttctattcttgggttaatcttcctgatggtctattgtagctggctgccactattactacttgagaccatcactacagcagttattactgttactgcttgagaccatcattacagcagttactactgttaccacttgagatcatcgttacaagactgaacgaagggaggaacgtagaaatgaaaacttaaagcaaaagaaactgttctaaggaaaggcaacacggggaggaagaagagcactccctgcttctagcgagcaaagacaacccccccttgagctcctgcagcccttcttatttattgggt

SEQ ID NO: 61744 - DNA, 302 bp, Homo sapiens
tccaccgcggtggcggccgagtacttttttttttttttttttttttccctttttttttcccccttttttgggttttaaccccctttgttttttaaaaaaggaaaccaaaaaaaggggttttggggggataccccttttttttttttaaaaaaaaaaaaaaccctcaatttcggtttttttgaatttttggggaagccccctcaaaaccttttttcccgggtattaaacaaaaaaggcttaaaaaaaaaaaattttggaaaaaaaaaaattttccccccaaatctcccctttaaaattttttt

SEQ ID NO: 61745 - DNA, 471 bp, Homo sapiens
  misc_feature 321, 322, 323: n = A,T,C or G
tccaccgcggtggcggccgggcgtggtggctcacgcctgtaatcccagcactttgggaggccaaggcgggtggatcacgaggtcaggagatcgagactatcctggctaacagggtgaaaccccatctctactaaacaaaatacaaaaattagctgggcgtggtggcgggcacctgtagtcccagctcctcgggaggctgaggcaggagaatagcgtgaacccgggaggcggagcttgcagtgagcggagatcacgccactgcactccagcctgggtgacagagcaagactccatctcaaaaaaaaaaaaaaaaaaaaaaannngcccccggcccctttaaaaaaaaggggacccccggggcgggggaaatttaattaaaatttttttaaccccccccccccggggggggggcccggccccccttttttttcccttttaaggggggtaaatgcccccctggggaaaaaaagg

SEQ ID NO: 61746 - DNA, 343 bp, Homo sapiens
  misc_feature 26, 79, 103: n = A,T,C or G
cgcgtactggtactagctgtttccgnatggggactccaccgcggtggtcggcgcgccgggcaggtacaatggtaatggnaatggaaatggtaatggcaatggnaatggaatgccgtcaaaccgaatggatggaaaggaatggaatgaaaacgagtggaatggaatggaatggaatggaatggaatggaatgatactgaatagaatggaatggaacgaaatggaatggaatggaatggaatggaatggaatggaatggcatggaatcgttccgagtggaataggatgaatgtattcgaatggaatgaaagggaatggaatcaccggagtggaatggaaccgatt

SEQ ID NO: 61747 - DNA, 287 bp, Homo sapiens
actttttttttttttttttttaaaactttttttgcggtttttttttaaaaattttttttgctttttttaaaaaattccgttttgggggcttaaaacttaaattttttaaaaaggccttcttttagccggtttgcccccccccccttttcattaatttttttttagggggggggggaaaaaaaaaaaaaaacccttttcctttttttgaaaacccttttttgaaggccttttttcccaagaaccccatttttttttttttgggaaaagggacctttttttaacccaaa

SEQ ID NO: 61748 - DNA, 301 bp, Homo sapiens
actttttttttttttttttttttttttttccaaaaattttatttaacccgtttttcaaaatttgggggggggggggggccccccaataaccccccccgggttttgggggggttttttaaataaaaaaatttttcctttaaaaaaaaagcttttcaaaattaaaaaaatttttattttcccccctttaaaaaaaaaaaaaccccccccaaaaaaaaggtttttttttgggggtttcccccgggggaaccccaaaaaaccgggggccctcccaaaaaccccaaaaaatttttgggaaaaaaaa

SEQ ID NO: 61749 - DNA, 300 bp, Homo sapiens
acgcggggacagggccacactccctctgaaggctctaggagtgaatccctccctatctcttccagagtctggtggctcctggtgttccttgatttatgaatgtgtaattccagtctctgcctacatctttacctggccctcaccgcttctccctgtgtctcccctctgtgtgtctcttataaggacacttgtcattcaatttagggccagccagataagccaggataatttcatgtagagatccttaattatatctgcaaagactccctttccaaattaggccatattcatagttttggg

SEQ ID NO: 61750 - DNA, 245 bp, Homo sapiens
ggaacttttttttttttttttttttttttttttttttttttttttttttttttaggggggggaaaaaaacccctttgggggcccccccaaggcccccaagggggggggggggaaaaaaaaaaaagggggggaaaaccccttttggggggggggtttttttgggggggcccccggggggggaaaaaaggggggcccttttcaaaaaaaaaaaaaaggggggggccccccaaaaaaaaaaattgggg

SEQ ID NO: 61751 - DNA, 260 bp, Homo sapiens
aaataaggttggttcataggtggtttgggacctgtctcaagtgtcaatttgtcattaagagtaaaggctcgataattgactggaaagagctttttaaagtttcaggatcaacttaaaatttactttgctcagaatatctatttaatgtttagttctcactcctgcaaaaaatactaaatcaggatctagttgtttgacaaaactgaagcaaaggaacagtgagtagtgtttatcctctcaactagccaatgaaatgaaag

SEQ ID NO: 61752 - DNA, 226 bp, Homo sapiens
acagttattaatgctggctgtgatgaagttttgctggggaccaggataacagatggtccagtcatggggcctcagtggtggcagtgattagctgatcatgcctgtcctttggccccaggttggcttatgctggcacttgtgttgttaggcccaagcagtctgatttgggggcctccacatggtttgctgggatgttggtagtttctgcttcctggcctgatgtggt

SEQ ID NO: 61753 - DNA, 298 bp, Homo sapiens
acccgccttggcctccccgagtgctgagactacaggcgttgagccaccacgccccgcctgggatctgaatatgttttatagatagaaccaacaagactttcttgacagtttggatataggatgtgagagaaaggagtccaggatgactgcaagggacctaaactagaaggatggagttgctatttactggataatgaagactcaaggcagaacaggttagtatcaggaactcagctgcggacatattaagtctgagatgcctattagacatccaaatagagacaatgaataagctgtt

SEQ ID NO: 61754 - DNA, 291 bp, Homo sapiens
acggggaagagccttgggcagaggtgagacatctgcaggagggaaggaactgagagaagggaaggtgtgcaaatgtggcaggaggagtttgagtaaagttccatctgatatcctctattttctctgtaaatcattctgaatgaagtatgagacaaagagatcaaaggcttgaaaaaaaaaaaaaaaaaattccccggggccctttaaaacttggggatcccccgggcccggagaattctaatataagccttttaaaacccgccaccctaagggggggcccggttcccaatt

SEQ ID NO: 61755 - DNA, 144 bp, Homo sapiens
acgcggggacgccttgtagccctcagcgcaagggcttgtgctgagggggcaggcggaactctgagataccgcacataacttgtttctctttcgaagatggagattaatacacctacttaaaaaatattctcattgggttactaa

SEQ ID NO: 61756 - DNA, 196 bp, Homo sapiens
actttttttttttttttttttttttttaaaaaaaaatttttttttttaccccgggggggagggggggggcaaaatttaaccccattgaaactttttcccccggggtaaaaaaattttttttccctaaccccccaaaaatgggggaataaaggggggccccccccccccccggttattttttttttttttaaaaaaa

SEQ ID NO: 61757 - DNA, 284 bp, Homo sapiens
actttttttttttttttttttttttttttccccgggggttaaaaaaaggcctaaactgggtttaaaaaaacccctttccccccggggaggggtttaaaggggttttaaaaccccctggggaaaactttttttaaaaaaacccccccaaaattttttaaaccccccccccttttaaaaaaaaactttaggggggtaaaaccccctttttttaaaaaaaaaacccggccccttttttgggaaaaaaaggggggcccggaaccccctttccaaaattttttttaaaa

SEQ ID NO: 61758 - DNA, 333 bp, Homo sapiens
actttttttttttttttttttttttttttttaaaatatttttatttaaaaggggaaatttgttggatttccctcttaaggcccaatattttggggaaaaattgggtggttttttttcttcccacacccctcttttttttttcctgttttaaattttgggaattttttttttgggggggaattaatttccccttgttaaaaataaagttttaggggggtttttggtccttttattggggggttttaaaggccttttttttttcctaatttttctctagcgcccctttttccccaaaaccccttttatgggggcccccccttttaggaacagggg

SEQ ID NO: 61759 - DNA, 226 bp, Homo sapiens
acatttttgggtttttttttttttttttttttaaaaaaaagggttttttaattttttcaaaaaaaaaaaagtccctttttttaaaaaaattttaagggtgggccaccctttttaaaaccctttaaaaccaaccttctttaaaaaggtccaaaatcaaaaaatttaatttggttggtttaaaaaaccttgggtttaaaaatttgaagggaccccccccgaaaatttt

SEQ ID NO: 61760 - DNA, 301 bp, Homo sapiens
tccccgcggtggcggccgaggtacccagaggaggagaaaagaagaacacaaaaaactctacccatggggaaggggcaggaatgtgcgctacctaacattacggtatatctggagaaagctcaggaacacttgtgaaggacacaccaccaagactcttgttcagagtgcctacctgaggttgaggcttaatcggaacatcagataccatcttctctcctccactctccaaccaccacactaacaagctttgagaagaataacagtggaatacaacttggagaaccatgcaaagggagaccca

SEQ ID NO: 61761 - DNA, 285 bp, Homo sapiens
acttttttttttttttttttttttttttttaaaaaaaaaactttgggccctttaaaaaaaaaggggcccctttttttaaaaagggttttttaaccatggggggttttttttttttttttttttggggaaaaaaaaaaccccccttttttttttaacccccaaattttggggggaaaaaaaaatttttcctggggggcccctttttttagccggggggaaaacccccccaaaaaaaaagttttaaaagggggcttttttaaccaaccaaaattttgggaaaaaaaa

SEQ ID NO: 61762 - DNA, 550 bp, Homo sapiens
acaggaaacataattctggcatctgctgggcctctggggaggcctcaggaaacttaaaatcatggtggaagatgaaggggaagccagcatgtcacgtagctggagcagcaagacagagggggaggtgccacacacttttaaacaaccagatctcatgagaactcactatcaggaaaacagcagcagtggagaaatccaccccccatgattcaattacctcccactaggtccctcccacaacacatgggaattcaagatgagattgggtggcgacacagccaaaccatatcatatggtatgctttctatggcatcatgtaacttagatatacgaagatattaccatccattcacctttagtcaacatgacaaacattcaagaaggtatttctaaaactaagcattcttagtctaatattccttaaaacagaagagcaataagagcactggctcagggttcgggaagcctttgtttgaatccatgctctatcatttattgaatgactacaggcaagttgcttactctatttaagccttggggctttgtcttt

SEQ ID NO: 61763 - DNA, 511 bp, Homo sapiens
actttttttttttttttttttttttttcccccccagaggggaagtttacccattacgggcgccttttttccttaaagtggaaaactctcccctgggttaacccagttggggatgtttttttccccccggggggaaaaagggttgaatatttaaaaaaggaccccccaaattaaaacggttttgaaaaaaaaacccccccccctcacggggggaaaacccatgttaggggagagaaaagggtctctccccctttgacccaaatttttggggggaataaaaacgccccccaccccccgggggaaatttttttttttttggaaaaagggggtctcatttttttggcggggggggttcaaaccctcttgttccagggggtcccggaaaggaaaaccgggggggcccccccccccgggcctttggttaaaatttttaaaaaaccacgcggcccccaaaaaataaagggttttcccccccttttttcgggggggttttttgggggccaccttaaaaa

SEQ ID NO: 61764 - DNA, 237 bp, Homo sapiens
actactcgattgtcaacgtcaaggagtcgcaggtcgcctggttctaggaataatgggggaagtatgtaggagttgaagattagtccgccgtagtcggtgtacaaatcccagctcagttgtgtggttgtggatgacattgagagattgcttgattacgtccctattggccctcgattttcaaatcttgtattacaggctcttctcgttttactgaaaaaggcacctcctcagggccgc

SEQ ID NO: 61765 - DNA, 312 bp, Homo sapiens
actttttttttttttttttttttttttggggaaaaaaattttttttttccccccagggggaaagaaaaggggggggctaaaaaaaaataaaaccccccccctggggggaaaaaattttcccccccaaccccccaaaagggggggaaaaaagggcccccccccccccccggggaaattttttttttttttaaaaaaaaaaggggttttttttttttgggccgggggggtttaaaaccccaacccttgaaaaccccccccttgggcccccaaattttttttttttaaaaaaccctttttagggggacccccccc

SEQ ID NO: 61766 - DNA, 290 bp, Homo sapiens
tccaccgcggtggccggccgcccgggcaggtactttttttaatttttttttttttttttggaaaaaatggggcctaattttttggctaaggcgggtttaaaaccccggggctaaaggaattttttaccttggccccccaaaagggtgggaataacggggggaaccccccttccccacccaaaatgtccttttaaaggccttttataaggtccactaaaaagggccttttatttacttataaaacaggtttaaaaaatttaaaaaggttggaggccccagagttttttttt

SEQ ID NO: 61767 - DNA, 485 bp, Homo sapiens
actttttttttttttttttttttttaaaaaaaaattttttttttgtgccctgggtttaatttaatttaatggaaccctcctcttcgggggtaaaaggaatcctgggccctaaccctctgaaaaagtggtttttaaaaagttcccccccctgcccgaataattttttgttttttaaaaaaaaaaaatttttttttttttgggccgggttaccctaaaactctaaccctctttttttaacccccccccttaatttcccaaaggggggggatttaaaaggggaaccccctttgccaaccaaaaaaaagtctttttaaaaaaaaaattttttttttttttaagggcctttttcttaaagggaaaacccccccccccaaagggggaaaaattttttccacccctttttttttatgggggtttaaatcccaaattttttaaaaaccttttccaccccattaaaaaaaaaaaaacccctttttaaaaagggg

SEQ ID NO: 61768 - DNA, 278 bp, Homo sapiens
tcaggttgaatctgtcccttacctgaaacgcttggggttagaagagtgttttggatttcatgttttggtgggggagggggaattttggaatatttgcttattctatatccttaatccaaaaatctaaaacgttccagtatttcctttgagcatcatgttggtgctcagaaagttgcagattttggaacatttttggtttgggattttgggattaggataactcaacctgtattttcctttcctgaacaatttgggaatgaaatatagacatcacaccc

SEQ ID NO: 61769 - DNA, 463 bp, Homo sapiens
actttttttttttttttttttttttttacccggggggccccccggggaaggccttccaaaaaggggaaaaccccggcctggtttaagggcccccccattttttagaaaaccccaaaaaataaaattggaaaaaaaaaaaagggaaaaggaagggtaaagggttaattttccgggggggggccccccaatagggcccaaaaaaggggggcccccaaaattttacccggttggcccccccccccggcttttgggtaaaaaaaaaaccccaggggtcccaaaaaaaccaaatgggggaaaaagggggggggggcccccttgggaaaaaaaggggcccggcccttttttattttaaaaaaaaaaccctttattcccccccccccctaaaagggggggcccccgggccgggtataaaaatagggggggggggggggaaaaaaagggggcggggccccccggggggttt

SEQ ID NO: 61770 - DNA, 225 bp, Homo sapiens
cgcggtggcggcccgagtacttttttttttttttttttttttttttccccctttataatattgggggatttggttatttgggggggaaaaaatagcccctgggaaaaataaaggttaaagaggggataggggcctttttaggggggaaaaaaaaaccctttggttttttgatttttttttttaaaggccccctttggccaaaaaccccgtttgccggggcccccc

SEQ ID NO: 61771 - DNA, 275 bp, Homo sapiens
actttttttttttttttttttttttaaagggcgcccctttccaaaaattttcttttggaaacccttttcccttttaaaaacttttaaaggggtacccccttttggccattttccttttcccaaaaaccaaaccttgggtccttttttccagggccaaaaaaaaaaggggaaaaaaaaaaaccctaaaaaaaaagggggtttcctggcccccccctttttaacctttaaaaaaaaatgaaccaattttttttttgggggaaacccccccccgccaa

SEQ ID NO: 61772 - DNA, 271 bp, Homo sapiens
acctttttttttttttttttttttcccttaaaaaaacaatttgggggaaaacccctttttcccttttttttggggtttttttttggccttccccccaaggttaattccccccaaaaaaaaaaaattttttttttttggaaaaaaaattgggggcttaaaaaaaaattttttttttgggggcaaagggggggtgggggggaaaaaaaaccttaaaactttaaagcccctttcccaaaatttgggggggggtaccaaaaggcccattgggggg

SEQ ID NO: 61773 - DNA, 263 bp, Homo sapiens
actttttttttttttttttttttgggccaccccttccaaaaaattttttttgggaaccctttgcccctttaaaaacttttaaagggggtcccccttttgggcaattttccttacccaaaaaaccaaacttgggtccttttttccagggccaaaaaaaaaagggggaaaaaaaaaaccccaaaaaaaaagggggtttcccggccccccccctttttccccttttaaaaaaaagaacccatttttttttttggggaaaacccccc

SEQ ID NO: 61774 - DNA, 328 bp, Homo sapiens
ctccaccgcggtggcggccgagtgctttttttttttttttttttttttttttacctgggggggccccccaaggagggttgggaaaaaattttttttttttttttagggaaaaataaaaaaaaattcccccggggccttttttttttttttaaaaggggggaagggtttttttttcgaaggggggggttttccctggggggtttttaaccccctttcccccaaaaaaaaagggggggatcctttttgggcccccaaaaaaaagggccaaaaaaaatgaaagggaaaaaattctgggggggggggaccttttttcaaatccccccccaaa

SEQ ID NO: 61775 - DNA, 144 bp, Homo sapiens
actttttattctttctcttttttggcggcgggtcgagaactttggctcttctctcgaccatgatgatgaagagaatgaagattatcccaaggtcattcagattgataaaaaaccatctaatgaagcgaccctggaactaattct

SEQ ID NO: 61776 - DNA, 597 bp, Homo sapiens
tccaccgcggtggcggccgggtgcggaggctcatgcctgtaatcccaaattgctaggattacaggtgggagccaacggtatccggcctaagacttgaattttaaaaaatttataacaggatacatctgtatttaatcattatgaatattatttactcagttaatctgactgcctttgaccataatggaaaaagaaatttgaggcattttgcacacattattccaatacttgccagatgtgttggggaagatgcattaagttctgcttgtttaagctaatgttctttgacactgcccaagatttctgacaaaagaatgacaagagagggaagttaaactggacttcctaatgctcctcggttttgatgaggaagtccaaatttctaatcactgaaaggggaaaatacatcaggcagtaaggtgtctaaattagataacttagtggcttgatgtaatttattagtatatagcatttaattacatgataaagtatattccttagttttattaatgtatttttataactgtcaaaacataagttgttaaagtatacttcttgtgaagccatttaaactgatactcgatgcatgtgggtggg

SEQ ID NO: 61777 - DNA, 294 bp, Homo sapiens
acttttttttttttttttttttttttttcccaaaggcaaaaaaaactttccctttttgaccaaaaaataaatttccaagggggttttaaggggttttggggccaatttaaaagggaaaaaaaaattttttttggaaaaaccctttttccccaggcccggggggtttccccccccccccaaaaaatcccccccattttttccaaaaaaaagggggggcccttttaaccttttttaaaaaacccccctgggttcggggggctaaaccttgggccccccccacaaaaattttttaaa

SEQ ID NO: 61778 - DNA, 479 bp, Homo sapiens
  misc_feature 299: n = A,T,C or G
tccaccgcggtggcggccgggcgtggtggctcacgcctgtaatcccagcactttgggaggccaaggcgggcggatcacgaggtcaggagatcgagaccatcctggctaacatggtgaaaccccgtctctactaaaaatacaaaaaattagccaggcatggtggcgggcgcctgtagtcccagctactcgggaggctgaggcaggagaatggcgtgaacccgggaggcggagcttgcagtgagccaagatcacgccactgcactccagcctgggtgacagagtgagactccatctctaanaaaaaaaaaaaaaaaaaaaaaaaaaaaagccccctcggcccctttaaaaaatagggaccccccggggcgggggaattttttttaaaacttttttatccccccccccccggggggggggcccggcccccctttttttttccttttagggggggaaaatgccccccgggggaaaaaaaggga

SEQ ID NO: 61779 - DNA, 580 bp, Homo sapiens
acgcgggggattctcagttttgctggaggccgcaaccaggcccgcgccgccaccatgtttcgaaatcagtatgacaatgatgtcactgtttggagcccccagggcaggattcatcaaattgaatatgcaatggaagctgttaaacaaggttcggccacagttggtctgaaatcaaaaactcatgcagttttggttgcattgaaaagggcgcaatcagagcttgcagctcatcagaaaaaaattctccatgttgacaaccatattggtatctcaattgcggggcttactgctgatgctagactgttatgtaattttatgcgtcaggagtgtttggattccagatttgtattcgatagaccactgcctgtgtctcgtcttgtatctctaattggaagcagtatcctttttatgttagcatttatggatatgaactttgaagggttttgatacttgtgttaattattaggaatataataataatatgacataggtaagattgtgaaaactttaaaacaacaaattggattgctctttcattagcctttataagcaatttatatttgctagacacaaataagcc

SEQ ID NO: 61780 - DNA, 232 bp, Homo sapiens
  misc_feature 117, 118, 119, 121, 122, 123, 124, 125, 126, 127, 128: n = A,T,C or G
actgcctctcatctagaatttattcctagcacttcaccacctccttcatcttctccttcaacaataaaccctgagatctttgcattcaaaaaaaaaaaaaaaaaaaaaaaaaaaaannngnnnnnnnngggggggggggggggggaaaaagggggaaaaaaggggggggcgggggaggttaaaaaaaaacttgtaaaaaaaccgggggggcccccggggggggggggggggg

SEQ ID NO: 61781 - DNA, 405 bp, Homo sapiens
actttttttttttttttttttttttaaaaaaacccctgggcccccgggggttggttaaaaacccctttggggggggccaaccccccccttttttgcaaaaaattaattttcccgggttctcaaaattggggggggggggggggccccccaaaaaccccccccgggtttggggggggttttttaataaaaaaaatttttcctttaaaaaaaaaggttttaaaaattaaaaaaatttttaattttccccctttaaaaaaaaaaaaaaccccccccaaaaaaagggttttccatggggggttcccccgggggaaacccaaaaaaccgggggcctttcccaaaagcccaaaaaagttttgggaaaaaaaatttaatttcccccccaaaaattttaatgaaaaagggttt

SEQ ID NO: 61782 - DNA, 303 bp, Homo sapiens
tccccgcggtggcggccgccgggcaggtactctttttttttttttttttttttccccacctggggggaaaaacttgggcctcctcctgtcccttttaaaaataaaaacccaggtctgggaaattgcccccttctgggcttaaaagaaaatccccctaaaaacgccaaaaacgggggttccccccaaattccttttggaagaaaaaacccctcattttttttagacaagggaaattttaaaaaaaaaaatggggcccgggtttttttaaccccccccccccccgaaatttttccccggaaaaaa

SEQ ID NO: 61783 - DNA, 236 bp, Homo sapiens
actttttttttttttttttttttttttccccccttttgaaaaattttttttgggggggggaaaccccaaagggggccaaaaaaagcccctttttttttttttttaccccgggggaaaaacccttttaaaatgtaaaaaaaggccccctttttttttccaaaattttaaaccccccccccccaaaaaagggaaaagggtccccttgggggtttcccccccaaaaaattttgaaaaaa

SEQ ID NO: 61784 - DNA, 530 bp, Homo sapiens
actttttttttttttttttttttttttgggccgttttgtttttttttaaaaaacactttttaattttcccccagggtgggaggccagggcccaaaaaaaatttgggggccccttaaaccccggggccaaaaccattctttttccttaaaaatttagaattagggcccttcccccccccctgggcctttaaaatttttttgggggcaaaaaaaaaaaacccccccccaaaaaatctttggttaaaaaatcccaggggggcttttttttccttttaaacaaagggaaacctttatttccttccccgaggaaaaaggggaaaaaaaccctttttccttttttaaaaaacccaaaaaaaaattttgcaaaaatcccttttttcccccgtttccttcccgggggggccttttaaaaataagggaccccccgggccggaggaatttaaatttaacctttttaaacccccccaccctgggggggggccccgccccccattttttttccctttaagggggggtaaatgcccccctggg

SEQ ID NO: 61785 - DNA, 405 bp, Homo sapiens
actttttttttttttttttttttttttccgggggagaaaattttttttaaatgggacaaccctttttaaatttttttggccctaaaaacctctagggggggttaaaaaaaaccttggggggggtgaggaattttttcccccaaaattttgggggtttaaaaactttaaaaggcccctgccttttaatttgggggagggaaaaccttttaaaaaaaaaaacctaattttttttttggggggccttaaaaaccccttttttaaaaaaaaaggggcccccgctttttttaaaaaaaaaatttggggccccgaaattaggggacaatcccccgtaaaacaactttctttcatttgggggtttcccaaatttcccaaacttttaaaaaggggtttttcccccttttgggg

SEQ ID NO: 61786 - DNA, 324 bp, Homo sapiens
tccaccgcggtggcggccgagtacttttttttttttttttttttttttttttgggggggggccccggggaaaacccccccctttttggaaaaaccttcccaaaaaccctttaaaaccccaaaaattttttttaaaaccctttttttggggtttggggggggaattccccccccccccaaagggggggtccttttttaaaccccggggttttttgaaaaaaaattttttttttttaagggggggcccaaaaggaaaaggtttttcggggggcctttttttaaaaagttccccccccccaaaattaaggggttttttggaaaaaaa

SEQ ID NO: 61787 - DNA, 284 bp, Homo sapiens
actttttttttttttttttttttttttttttttgggaaaaaaaattttcctttatccccttaaccggggggggggggagggggataattttaattcccccccccctttttttttgggggaaaaaaaaacccccggcctaaaccctcggaaacgcctttaataaaggggcccccccccctggccggggttatcctttttttttaaaaaaaaaaggggtttccccttttgggccgggggggtttaaaaccccggaaccaaaagaattcccccccccaaacccccaa

SEQ ID NO: 61788 - DNA, 217 bp, Homo sapiens
acttttttttttttttttttttaagggtttttttttggtttaaatttgccctttcccccccccccttttaaaaaaaagggcctttatcccaaaatttaaaaaggggggaatttcaaaaacccctaattttggaccttttttggggggggggtggcaaaaaaaggttcggggaaaaatcctaaaaaaaaaaaagggggggaaaaacctttggggggaa

SEQ ID NO: 61789 - DNA, 321 bp, Homo sapiens
agacttttgaagttatattgtaaccatggtatatgtattgaaaacttggccattttaccccattcctatgaatgaaaactatttggtgaatcagaggatagtctgaattgggatatgaaggccagtataagtgtcagttagcaaagtcagctctagtttagttttttttttttttttttaaaggcgtaccattactaaaagtttagttttggaaaccttgtaccatctaaaaaactttaaaagggttaacatctatgggcaaatggactaatacaaaaaactaaactttggttaatgttttcaatgtctaaatgaaaaatg

SEQ ID NO: 61790 - DNA, 280 bp, Homo sapiens
acttttttttttttttttttttttttttttaaaagggaccggggggccccaaaaaaggaaaaaaataaaccggggggttttttttttttcccaccccggtttttaaaatttaaaaaggccccccaaaatttttttgattttgccttacccccccaaaaaaattttgggggggaaaaattttaaaaccccgggggggggctttttaaaaaaaaaaaaattttggcccccgggaaagggggaaaacaaacccttaaaaagccctttttcctggggtcccccc

SEQ ID NO: 61791 - DNA, 515 bp, Homo sapiens
tccaccgcggtggcggcgcgaggtacgcgggtctgatccgtcattatacgcaagattgaaataacagtagctggctgggcgcggtgactcacgcctgtaatcctagctctttgggaagctgaggcaggcagatcacctgaggtcaggggtttgagacaagcctggccaaaaaggcaaaaccctgtctctactaaaagacacaaaaattagccaagcgtggcacatgcctgtaatcccagctactcaggaggctgaggtgggagaatcacttgaacccaggaggcagagtttgcagtgagccgagatcgcgacactgcactccagactgggtgacagagtgagactctgtctcaaaaaaaaaaaaaaaaaaaaaaattcccttccgggggggccctttaaaaaataggggatcccccgggctggagaattttaatttaaatttttttaaaccccgcaccctggggggggggcccggcccccatttttttttccttttaaggggggtaatttgcccc

SEQ ID NO: 61792 - DNA, 286 bp, Homo sapiens
  misc_feature 228, 229: n = A,T,C or G
acttttttttttttttttttttggaaacacccccccggggggggaaggggaaatttgcccccccggctcctttcttgggagggggaaccgtttttaagggccccttttcgaaaaaaaacccttattccccctcccccgggggccccatgggggggccgggaaattcccttaaaagtttattggggaaaactttaaatgggttccccccccccgggggggcttcaaatnnccccgggttttttaaaattaaaaaaagccgggggcccccccccccgggccttttaaa

SEQ ID NO: 61793 - DNA, 128 bp, Homo sapiens
acttttttttttttttttttttttaccccaaggggggaaaagtccctaattttccttggcttttaaaaatttcccttttaaaaaaatgccggggtttttttttggaaaaaggcccctctttggggggc

SEQ ID NO: 61794 - DNA, 567 bp, Homo sapiens
actgcctccacaggctttggcttctcagggcctgcttttggaagcatgtggccaggaggaggagggtgcagcctctaatcaggttgggcttatcagatggtgatacctcttactaaaaagaaaaagttgggcttggttggaaaagaaagctgtggatgttggtgagaacccagtgtctgctacaggggcattccctgtctgggaagttatgtagctgggatggctgaaagagaaagaagtaatttcttctgaagaaattatctgtgggttaaaagttagctggcaaaatggagacatctgagacatcacaatgcgtttgttagatctgggataatgctatcattttaaagggataatgctatccagaagagaatggctggaatggtgaagaatgtgaaaaatttgacatgacaggtgagtggactgtgagggagatatttcgcctagataagaaaatgtgacattagtggtggtagtaaggatcgttagtattttcacatattttatgctttgtctctggaaggctaagcatgtaacttgcttaggctgaagcaggctttttacccg

SEQ ID NO: 61795 - DNA, 512 bp, Homo sapiens
tccaccgcggtggcggccgagtacttttttttttttttttttttttttaaaaaaaaaatttttttttttttcctaagcccaaattgaggggcaaaaatttgtttttttaaaaaccccccccccggggttaaacccttttttctccccaaacccttaaaaaaaggggggcaaaagggccccccccccccccccaaaaaatttttttttttttaaaaaaaaaaggggtttccccctttaaaccaaaaggggttaaaatccccaaccctgaaaacccccccccttggccccaaaaagggggggaaataaagggggaaccccccccccccaagtggttaacccaattttttttttttttggaaaaaaaaccttggggggctttggtttttaaaaaaatcccccttttttttgggtttaaaaattgggggggacccccccccgggcgccaaagttttttttttttttttttttttttttccccccattttggcctccccccccccaaaaaaaaaaaa

SEQ ID NO: 61796 - DNA, 558 bp, Homo sapiens
acgtatgtgtatatgttacgtgtgtgtgtgggtatgtatattcacattcagtgagatgatttcagttgtaaaaacttgcaagtaatttataaagaatagcttctataatactaattgtattaactgaaccatcctcttagagtattagtgtaaattggaaagtatttgagagttgcataggattcaggaataaaggttttggatatttattaatggattttaaaatgatgattaagctttgaactaattttaaatttccgtttccagaatttcgtcctggtgagccatggaaaggttatccaaacattgaccctgaaactgacccttacgtcactcctggcagtgtcataaacaatctttcaattaatactgtgcgggaagttgaccacctcagggacaggaacagtggtacgtagggggtgcaaatcaatttctgagtgacacttaacacagtttaagaatggctcatgtagtacccagctactctgggcgactgagcccagggtactctgggatcacttgagcccaggagcttgaggcaagcctgggcaacatagt

SEQ ID NO: 61797 - DNA, 427 bp, Homo sapiens
actttttttttttttttttttgcccccccgtttttaaaaagggggaagaaaaactttttttggcccccccggggggtccccctttaaaattccccccctttggggggcaaggggggaaaaaacctttgcccctagggtttaaaaaaccccctaaaaaaccaaaaacccctttttttttaaaaaggaaaaaaaaaatttccccttctggggggccccccccttttttttccctccccggggaacctaaaggggggggattgtaattggggcttcaagaaccctttaatttccccttgccccccccccgggggaaaaaaaaaaaccccttcctaaaaacaaaacaaccccccccccgaaccaacaaattttttattctcaaaaatttttttttttaaaccccggggggggacccccgcgcccttttaaa

SEQ ID NO: 61798 - DNA, 140 bp, Homo sapiens
acttttttttttttttttttttttttttcccccccccgggggggggcccccgggggggaaaaaaaaccttggggggtaaataaaaatttggggcttaaatttggcccttagggtttttaatcccccccccctttttgggg

SEQ ID NO: 61799 - DNA, 280 bp, Homo sapiens
gggactccacccggtggcggccgccgggcaggtactttttttttttttttttttttttttttttacggtaaaaaccccctttttttccccccttaaagagggggagcccccaaaaattttaaaaaacaccgaagaaaaattcccctttaaaattaaaaagggggaaaaaaacttttgggggccccccccccttggttttttcaaaaagtaataccattcgggggaaaatttttaggggggggggggggggcccaaaaaatttttttaaatccttttaaaa

SEQ ID NO: 61800 - DNA, 127 bp, Homo sapiens
acttttttttttttttttttttttttttaaaaaaaaggaatttttctttttttcccccgggtgggggggaaggggacaaaatttgggcccaataaaaaatttctttttccgggcccaaaaaaatttt

SEQ ID NO: 61801 - DNA, 289 bp, Homo sapiens
ctccccgcggtggcggccgaggtacttttttttttttttttttttttgccccccccttcccaaaaaatttaccttggggaaccccttgcccctttaaaaaccttttaagggggtccccctttttggcaattttccttatcccaaaaaccaaccttggggtccttttttccaggcccaaaaaaaaagggggaaaaaaaaaaccccaaaaaagaaagggggttcccgggccccccccttttaaccctttaaaaaaaaagaaaccaattttttttttgggggaaaccccccc

SEQ ID NO: 61802 - DNA, 513 bp, Homo sapiens
actttttttttttttttttttttttggaaattttttcccccttcccgttttccccaattatttgggaaacaaaaccaatttttccccccgggttttaaatttccccccccccccaggggaactttgggggaaatcccgggtttccttttttttaaaattttttttttttttaaccggctttcccaattttggggggggcccgcttttatttttttgccccccctttaacccccccaaatttttttcttttaaaaaaaaaggggaaaaaaatttttttaacaaacccccaaaaaaaatttttttttttttttaaacaaattttccccccccaaaggggatttttcctaaaaaaaaaaagggggggcggggaaaacttttaaaaaaacccgggaatttttttgggggggaaggaaattaaaagcccccttgggcccttataaaaaatttttcccccgggggaccccgaaaaaccccgaaaaaaaagaaaaccccccctaaaaataaaaaaaactt

SEQ ID NO: 61803 - DNA, 275 bp, Homo sapiens
actttttttttttttttttttttaaaaaaggggcccctttttcccccttttggggggggcagggggttaaatttggtttattggacccttaatcccccggggtaaaaaaaaccctctgcctaaaaatccctttggggggggatttttggtggccccccttgggccccacaaagggtaaaaaaaaaaatttggggaacacggggattccctttttttcccccgggtttttcaaaacttttggggcaaaatttttttttccgcttggccctcaaaaa

SEQ ID NO: 61804 - DNA, 339 bp, Homo sapiens
  misc_feature 31: n = A,T,C or G
taccgcgatctgcgactacctgtttcctgtnggactccccgcggtggcggccgaggtactttttttttttttttttttttgggaaaaaaaattccccccttaaaaaaaattttttaaaattttgggaaaaattttccaagggttccttaaaccaaaaaaatttccaacccggaaaatttttaaaaaaaaaaaacccttttttcaaaaaaaaagggcccatcccaccccttttttaaaacccttttggggggccccttaaaaataaaattccgggaacccaatttccccccccaccaaaattttttaccctttttggaaaagggttttttccccccctaa

SEQ ID NO: 61805 - DNA, 244 bp, Homo sapiens
actgaatactgtagctggttgtaacatggtgagtatttgtgtctctaaacatagccaaacatagaaaaggcacagtaaaaatacagtattataatcttgtgggaccaccttcctatatgtggtcattgaccgaaacatcattatatgttacctggctatattatatcttacatgattccatttatattgaactataaagtaggcaaaatccatagaaacagaaagtagactgcaagtgggtggg

SEQ ID NO: 61806 - DNA, 313 bp, Homo sapiens
tccaccgcggtggtcggccgaggtactttttttttttttttttttttttttttttggcacgggggatttaccaataaccacccctctcaaaggggggcccgttttccaccctttgttgccttaaaaaatgtttaatttcccacaaggcttatcatggtcataaaaaaattcctgcttttttgaaaaaaaaaaaaatttcccgggggttttaaagggtttttgggcccaaataaaaagtaaaaaaaaaattttttttgaaaaaacccttttacccccgcccgggggggtttcccccccccccaaaaaaatcccc

SEQ ID NO: 61807 - DNA, 213 bp, Homo sapiens
  misc_feature 182: n = A,T,C or G
actgtgagtccattaaaccactttttctttataaattacccagtctcaggtatgtctttatcagcagtgtgaaaacggactgatacatgcccggagtgctttttactcctggcctcttgactctgttacagttagtttatgtaaagaaagaccccatcatatgatcaatttttacagtactncactctgttgctataccataaaattaaattc

SEQ ID NO: 61808 - DNA, 278 bp, Homo sapiens
cgcggtggcggccgaggtacttttttttttttttttttttttttttcccccaatattttttttttaagaggggaaatttgttggaattcccttgtaaggcccattatttttgggaaaaattggggtgtttttttttttcccacccccctttttttttttccccttttaaaattgggggaattttttatttgggggggattattttcccctccgttaaaataaatttttacgggggtttttgcgccctttatgggggggattaaaacccctcttttttt

SEQ ID NO: 61809 - DNA, 263 bp, Homo sapiens
acttttttttttttttttttttttttgggggaaaaaaggtttcccgatttggggttggggggtttaaaactttgacccttaaatattttgcccccccgggcccctatagggggggggattggaaaaattaactccccgccccagcctttttttatttttaaaaagggggttttttaaaaatttaaaaagaattggggggttaaaatttggggggccccttttttttttttttggaaaaccctggtttaaggcccctttttttt

SEQ ID NO: 61810 - DNA, 462 bp, Homo sapiens
actccagcctgggcgacagagcgagactccatctcaaaaaaaaaaaaaaaaatacctggtcttaggggcccccccctttttcccaaactttgggaaacctcaggcaaaaggatcctttgcccccaaaatttcggggttccggggacccttatttttccccttgctttccaactggggggcaaaccagggctcccacctccaaaaaaaaaaaagggtttttgggttaaaaacccttgaaagggatttaattttgaagaaaaaaaaatatccctgcccttttttgctcggggccaccaccttggaaaaaggaggatttttaaaatttacctcccgggaaaaaaaagggggaaaaaaaacccaaaaaaacccccattttttcccggtttgaaatttttctcctatttggggaaaaattggggggaaaatggggaaaccaaaatgggttccccaaaaaattttttt

SEQ ID NO: 61811 - DNA, 566 bp, Homo sapiens
tccaccgcggtggcggccctagtacaaaacgtgcaatctctggcagctgatactgccttgtcagagaaaaacccctgttcctcacttctgccactgccatttcattgaaaatgtatgcaatcattaaagaccaacacttaaatatttcattataattgcatatttattaaccaatcaaagggtaggatcttttttttggcacgctgactagagatgcaaatcatcttccatgcaaaatacacactcacaagtcaacatctacaattcctggtttcagtttctttaaagcagtgccaaagttaatcacctgtaaagcatatggaatacaaactatggttttacaattttttacagctgttttgcctttaagttatttggtgacaatttttttttagcaaatcaatattatccattctatccaaagtacgtggctgtaatcccagctactctggaggctgaggtaagaggactgcttgagcccaggaggtcaaggctgtggtgagctatgattgtgccactatacttcagcctgggggatacagtgagaccctcaaaatagcaggggt

SEQ ID NO: 61812 - DNA, 299 bp, Homo sapiens
ctccccgcggtggcggccgaggtacgcgggtgggcgcaggccgtttggcatctctgccctcatcgtgggtttcgactttgatggcactcctaggctctatcagactgacccctcgggcacataccatgcctggaaggccaatgccataggccggggtgccaagtcagtgcgcgagttcctggagaagaactatactgacgaagccattgatcgagcggccgcccgggcaggtacatgaatagcaactttattcaaaattgctcaacctggagacaacctgaatgtcctcaaacctgtga

SEQ ID NO: 61813 - DNA, 346 bp, Homo sapiens
actcttttttttttttttttttttttccaaaaccaaaaaagaaaaattttttcccaaagcgggcgctaaaaaaccaggggggcccctaaaattttccccgggacgggggggcaaaaaccctggttttttatgggcataaaagtgggcccaaaatttaaagggttgggccccgggaaaaaagtttaaaaaaactttgggtttttggaaaaacccccaaaaaggggcccccccccccccggggggccttttaaaaaaaatttttaaacccgggaccccccttcccttggttgggaacaaaaattttttttttttggtttaaaaaagaaaagaaaaaaaaccttgaatt

SEQ ID NO: 61814 - DNA, 286 bp, Homo sapiens
acttgtctggttgcttcttcacgattggactctgatcagacactttgccaggaagatcacagcagtgatggtctgtattatacttcccactgtatcacataagatgccatgccgccttgtctcactgtttgggatccttagtttgatcacttggttaagggggtgtctgccggctagctcagtgtaaaggcaccctgtttcctttgtatccaataaataatcagtgagatggaagtttgagaccatgtgaatatcctgttcctcaaaagaccttttacccaaatac

SEQ ID NO: 61815 - DNA, 263 bp, Homo sapiens
acaagcctgtggtaactcatgatagcgacctgtgccatctgtgttccttatatcattcccagcatcagcctagccctagccctctggcatttacttattagagagatgggaaaggagctaaaaatatgaaactccagatgatagcaattgtcctaacaacagctggcagtggggactcctctccctcagtaaagtgggggaatccaaataggcaaagtcaggcagagccttctactagcctgagaaaagatcagaccaggcct

SEQ ID NO: 61816 - DNA, 432 bp, Homo sapiens
ggtggcagccgcccgggcaggtactcgagtgaaaactctgggctgggtggagtggctcatacctgtgatcccagcactttgggaggctacggtgggcagatcatctgaggccaggagttcgagacctgcctggccaacatggcaacaccccgtctctgataaaaatataaaaattagcctggcatggtagcatgcgcctgtggtcccagctgctcaggaggctgaggcatgagaatcgcttgaacctaggaggtggaggttgcattcaactgagatcataccacttcattccagcctgggtgacagagcaagactctgtctcaaaaaaaaaaaaagggaaaactctgtgagggacatttgttaagaaaaccccttcagtttttatccttcttttccccacagaagttttttttcctgtcacctaaaagggac

SEQ ID NO: 61817 - DNA, 451 bp, Homo sapiens
gcggtggcggccgaggtactttttttttttttttttttttttttgggggttttttttttttttttttttttttttttttttttttttttttttttttttttttttttttccccccccgaaaaaaaaaaaaaaaaaaaacactatatccccccccccccccccggggggggaaaaaaaaaaaaaccccccccccaaaaaaaaaaccccccccccccccccccccgaggggggaaaaaaaaaaaaaaaaaacccccccccccccccggggggaaaccccccccccccccccccccccccgggggggggcaaaaaaaaaaaaaccccccccccccccggaaaaaaaaaaaaaaaccccccccccccccccccccccgggggggggcccccccccccccccttttcccctaaaaaaagagaaaacccccccccccccaaaaaaaaaaaaaaaaaa

SEQ ID NO: 61818 - DNA, 105 bp, Homo sapiens
gaatgcttctcgatccactcatgcaagatgtgtaaaactcatcatggaaataatctatactaagctttcaatattgacatatttatataaaaatttattgcaata

SEQ ID NO: 61819 - DNA, 330 bp, Homo sapiens
tccccgcggtggcggccgaggtactttttttttttttccttttttttttttgggccttttttttttaaaaaaaaaaaaattgccggggaaaaaaaaaccaaaaagggtttttgggggggggcgggttcttttttcggggggggttggaaaacccgggttttcagggggcgggttccaaaaaaattttttttggggggggccgggcccaaaaaaaaaatttttttggtttggcccccccccaattgttttttaaaaacccgggaatttaccccccggggggcaaacccccctttttttaaaaatttttaaaaaaaaaaaaagttttttttt

SEQ ID NO: 61820 - DNA, 405 bp, Homo sapiens
actttttttttttttttttttttttccccccttcaccagtttttcctttttttcaataaaaacccccgccaaaaatttgggaaaaatttttcccccaaaaggggggggggaccaaaaaaaaacctgggggaaaaaaaaatttttaaaccccccttcccttttttaaaaaaaattttttgggccccccaaaaccaggggggtttttccccccccccttttttttttttttaaggggttccggggggccctccggccaaaaaattttttttttggtttaaaaaaggattgggccttttttaaacccccctttttcttgggttttttttttttacccccccccttaaattttttggggccccccgttccttccccggggggcctttttaaaatattgggtccccccgg

SEQ ID NO: 61821 - DNA, 305 bp, Homo sapiens
tccaccgcggtggcggccgtcgccggcagcaactcgggaggctgaggcaggagaatggcgtgaacctgggaggcagagcttgcagtgagccgagatcgcgccactgcactccagcctaggtgacagagcaagactccgtctcaaaaaaaaaaaaaaaaaaaaaaaaagtcccccggggcccttttaaaaaaatgggggaccccccggggggggggaaatttttttaaatttttttaaacccccccaccctgggggggggcccgggcccccatttttttttctttttaggggggttaattcccccc

SEQ ID NO: 61822 - DNA, 287 bp, Homo sapiens
actttttttttttttttttttttttttttttaaaaaagaacccgggggccccaaaaaaaaaaaaaaaataaacccggggtttttttttttttcccccccctgtttttaaaattaaaaaaccccccccaaaatttttttgatttttccttccccccccaaaaaatttttgggggggaaaatttttaaaaccccgggggggggcttttaaaaaaaaaaaaatttttggccccttgaaaggggggaaaccaaacctttaaaaaaccctttttcttgggtttccccccaaa

SEQ ID NO: 61823 - DNA, 221 bp, Homo sapiens
actttttttttttttttttttttttttttcaaaaaaaaaaggtttaccctttttccccagggtttttttaaaccccgggcccaaaaggattttttacccccaccccccaaaaggggggggattaaaaaaaaaaccctttgcccccctttttggttttttttttttaaaaaaaaaaaaaaggggggtcaacctaaagggcccccaaaaaaaagccctttttt

SEQ ID NO: 61824 - DNA, 313 bp, Homo sapiens
  misc_feature 10, 11, 12, 24, 42: n = A,T,C or G
ggtggcggcnnncgcccgggcagngtacgccgggggacaggngaaagagaaggtcccagactcttttaaacaaccagatctcatgtgaactgagtgagaactcactcatcaccaaggggatggcactaaaccattcatgagggatccattccagtgatccaatacctcccgctaggccccacctccaacattggggatcacatttcaacatgagatttagaggggatgcccatccaaactatatcaagtagtttgttggcaagtgatggttctggagctgttggggcttaagaagagtgtgtttactctttgc

SEQ ID NO: 61825 - DNA, 137 bp, Homo sapiens
ccgcctggccaaaatctgctttttttgcgttgaacaagtgctgcacttcatactgtgtgcttgtgttcatcacttttttctttgtattctttgtatccctagcatgtttgtggtggtttgttttctctttgatattt

SEQ ID NO: 61826 - DNA, 445 bp, Homo sapiens
actttttttttttttttttttttttgcccccccccttggggaaaacccccttctttttgaaaaaaattttaaaaaaaactttaaaaacccaaaaaatttttttaaaaccccttttgtggggatttgggggggaatttctcatcgcccccaaaggttggttattttttaaatccaagggtttttttggaaaaaaatttttttttttaaaggggggcccaaaaggaaaagggttttccggggggctttttttaaaaagttggctttcccccaattttaaaggttttattggaaaaaaaaattttttttcccaattaacccttaaaaaaaccttttttaaaaggaaaccttttttttccaaaaatttttttaattttaccgggttttccccccccaattttcccattatttttttttttttgtttttggagggggaccccggggaaaa

SEQ ID NO: 61827 - DNA, 466 bp, Homo sapiens
acttttttttttttttttttttgggggggggggggtgaaccctaaccccttttttaatgggggggcttttttagccccccctgggggggaaaattttttccccctttaaaaagggtttttcctagggcccaaaaaaccttccctttttggcccaaccataaattttcccgggggttttaaggggttttggggcccaatttaaagggaaaccaaaattttttttgggaacaccctttttcccccggccggggggggtggcccccctcccccaaaaattcccccccttttttgccccaaaaacggggggccctttttacctttttttaaggacccccctgggtttgggggggctaaacttgggtcccccctcaaaaggtttttccaggaaatccctttccccaaagggttggggggtaccccctgccattttaccccggggaaaaaatttaaattttcccctgggggg

SEQ ID NO: 61828 - DNA, 257 bp, Homo sapiens
acttttttttttttttttttttttttttaccccccccccggggaaaaaccccctttttttggaaaaaaatttccaaaaaacctttaaaaccccaaaaactttttttaaaaccctttttgtgggattttgggggggaattcccccccccccccaagggggggttttttttaaatcccaggggtttttttgaaaaaaattttttttttttaagggggggcccaaaaggaaaaggttttttggggggcctttttttaaaa

SEQ ID NO: 61829 - DNA, 290 bp, Homo sapiens
actttttttttttttttttttgcccccaagggggtttttttttttaccccctccccttgaattaagggagaaaactttagggggccttgggcttttaaagaaacccctttttttctgggggggttgggtttttcaaaaccactggtccttaatggccttcccttttaaaatgcccgtttctttcctgggccccgaacccttttttttttaaaaaaggcccctttttttaaaaaatacccaccctcctttgggaccaaaaccttttccccttcaattttaaaccccccctt

SEQ ID NO: 61830 - DNA, 285 bp, Homo sapiens
acttttttttttttttttttgggtaagaaattcccccaaaaaaaaattgaaaaattccccgggtggggggctttaaaaaaaattttttaagaccccaggggggggcaattcccttaagggttttaaaatttttggggggcaaaaaagggttttttaaaaaaaattccccaccccaaaaaaaaaagggtggggaaaaaaatttgcttaatttcccaacttaaacttgattttattttttgggaaaaaaacccccccccccccctttttttaaaaaaggtttcccca

SEQ ID NO: 61831 - DNA, 292 bp, Homo sapiens
actttttttttttttttttttttttttgggcctttgggaagggggggggggggaatttttttttaaaatttttaagggggggaaaaaaaaaaatggaaagggtttggggggtaatttggggggcccccccgggtttttttttgggggccctttcccttaaaaaaggggggggtcctttttcctttaccccaaaaggggtacccccaaataaccttcaacagggcccttaaagggggaaaaggggggcctatggggaaaaaccccccccttttaccaaaatttttagggaaaa

SEQ ID NO: 61832 - DNA, 307 bp, Homo sapiens
actttttttttttttttttttttttttaaaaaaaaaaagtttttttttttccccaaaaagggagggcaggggaaaaattttttttaaataaacccccccccttgggggtcaaaaaattttttcccccaaaccccccaaaatcccaaaaataaagggcccctccccccccccccaatttttttttttttttttaaaaaaaaaggggttaacccttttggcccaaaatttttttaaaccccccccccaaaaaaaacccccccttttgccccccgttttcttcccggggggggaaaaatttttttttttt

SEQ ID NO: 61833 - DNA, 344 bp, Homo sapiens
gcgatcatggtacttacttgttggcctgattgggagctccaccgcggctggcggcgcgaggtactacatcaagggcaaccccctgtgggacaaaaaatctgaacaacagccttcaaccctagaccttccctctgacagagcctacccaaataggaaagaaccaggaaatcaaccctggtaatatgacaaaacagggttcatcaacacccccataaaatcacactagttcaccagcaatggatccaaaccaagaagaaatccctcacttacctgaaaaagaattcaggaagttagttattaagctaaacagggagggaccagagaaaggcgaagcccaatgcaag

SEQ ID NO: 61834 - DNA, 278 bp, Homo sapiens
actgtggtaattaggctgggctgattgattggaacagaaggaagcagctgtgtttgctaagactcgctaacacacttctgccagagacttcctggcaaagttttgaacaatcctgttttcagcatgattcatggctccctgcagacatcacctaattcaggaaatacttttgaaacactgttcatgtgcagtttgtgaaaacaatccaggaaaacaatctttagtgccattgaaaataaaacttacctccctcctctgtgaaatagatgccaggtgaa

SEQ ID NO: 61835 - DNA, 295 bp, Homo sapiens
tccaccgcggtggcggccgtgcgtagactagtcagcttctggtgtgtgactagagctgggcttgtcgtcccctccagcttcagctgtgcatagactggtcagcctccagagtgaccagagcagggctgtcgtcctcagcagcagcttggtctcatctcaggatcggctgagttggatgatctgggtcttgctggctgttccacttgtcctgaactgctggtttcagctgactgtggtggacctatggcatgattccagcaaatttaacagcagtgggagtggacaagaatacagt

SEQ ID NO: 61836 - DNA, 351 bp, Homo sapiens
ggatttccggaatttcacttggaaaaaaggggaaaaatttcctttttttttaaaaccgcttttaagaatttttttttcccaaggggcccttaaaaccccaaaaatttttggaagggttttttcctaaaaaccttttttttttttttggaaaaatttaaaaaaattttggaaaatttttttcccattcccaaaatttttttttaaaaaataaacccttttgggggaaaacatttccccggggggttaaaaccaagggtttccccttaaaaggttttttttattttttaaaaaaataccccttttaaaaaggtattgggtttttttttttctttaaaactttttttttttttt

SEQ ID NO: 61837 - DNA, 227 bp, Homo sapiens
cttttttaaaaaaattaccattttttttttttttttttttttccttttttttaaaattaataccaccctcctctttttcctcctccccttggcccgccccccccaaacaaaaaaaaaacccccccccccccccccaaaaagcgggaaacccccaacccgcgcccggcgaaaaaaaaaccccacccccccccccctaaaaaaaaaaaaacccacctcccccccccccc

SEQ ID NO: 61838 - DNA, 278 bp, Homo sapiens
acttttttttttttttttttttttttgggggtgggggggggggttttttttttttttttttgggaaaaaaattggggccccctaaaaaaaagaaaccccctttttggtttaaggaaaaaattttttgttttccggggcccccgggggggggttttttcctttttagggggggggaaatttttaaactttttttttttccggccctcttttttacaattcccccccggttttgaaaaggggggggtaaaattcaaacttttttttttttttttggggaa

SEQ ID NO: 61839 - DNA, 304 bp, Homo sapiens
acacagagacagatacatacagaggaaagagatgtgaacacacagggagaagatggccatctacaaaccaagaagaaggtcctggaaaacatccttccttcactgcctaaagaggaacaaaccctgccaacaaaccttgatttcagacttacagccttcagaaagaatcatgagacaataaatttctgttgcttaagacatctagtttgcaacactttgttacagtagccccggcagatgaatacaaatggtttccacattttcaagtggttaaaaaaaatatgttattctgagacgtgaaaat

SEQ ID NO: 61840 - DNA, 120 bp, Homo sapiens
actctgtggaatggtcccatgctagacagaactgcttaacggcaagcactaagtgaagcatgaaagcgtttaaaagaagacacacaattcctattggatgtggagaaagaactggagatg

SEQ ID NO: 61841 - DNA, 451 bp, Homo sapiens
  misc_feature 18: n = A,T,C or G
ctccaccgcggtggcggnccgaggtactttttttttttttttttttttttttttttttcccttaaaaaagggttaacaaataaaaaaagggggggggggaccctttttcctaaaaaaaaatttggcccccaaccccccctaaagaagcccaaaaaaaaaatccccccgggggttttttaaaaaaaaacccgaaaaaggccccaaaaaaggggttccggaaaaaaaacaaatttggggggggggggaaaaaaattttcccaaacccccttttatcggggttaaaaaaaacccccaaaaaaaaaaattaaaaaaaaaattttttttttaaaaaaccccaaaattttttttttaaggggggggggggctttgaaaagtttttcaaagtttttttttttgggggaaagggttttttgggaaaaatttaatttccttcccgggggggccctttaaa

SEQ ID NO: 61842 - DNA, 300 bp, Homo sapiens
actttttttttttttttttttttcccccaatttggggaaaacccaattaatttttttccccaatttaaaccatttccccaaatttttaaaccctttttttttttaagtgggggaaaaaaatttttccatttttgaaaaaaaaaacccttttttacctcccccccccaaaatcctttttaaaaatgaaaatttggaattttaacctagggcggggggaattttccaatttttttttttggggggggggggcaaaaaatttttccaaatttttttccctttaggccggtaaaaaacccaaaa

SEQ ID NO: 61843 - DNA, 364 bp, Homo sapiens
acttttttttttttttttttttgggggcggggggttgcttttttcccccaggggggggcaccggggtaaaacttgggctcccggccccctaaattttgggggataaaagaatctttttacccaaccccaaaaaatggggggaccccagggcttcccccctttttaaaaaaatttgggaaacccaaaattttttttttttccccagccccttttaaaaatttgggatttaacggccccccccccctttttaaaaattttttaaaggggaaatataacccggtttaggggaatttaaaaatcttaaaaaaccccccccaaaattttggttttttttttgaaaaagggtttttccaaattggggggg

SEQ ID NO: 61844 - DNA, 153 bp, Homo sapiens
actttttttttttttttttttttttcccctaaaaaccccccctgggggggttccccgggggggaaaaaaaaccctggggggggattggaaaatttgggccgtaaattggcaatccagggttttaattcgcccccggcttttccgggggaaaat

SEQ ID NO: 61845 - DNA, 354 bp, Homo sapiens
actttttttttttttttttttttttttcctttttatttggggggttttttgggggaaagggggccccaaaagggggccccccggccccctcgggggaacccctttcaaaaagtttttttgcttttaaaaaaaaaaaccccttttttcttttttaaaccccttttggggaaccccctttaaattttccccctttttgggggggggggttttttttttcccaaaattggggggggggggttttttttttttaaaaaaaaaaaaaaaaagggggggggatttccctttttcccccaacccccaaaaaaaaaagggttttgggtttttttaaaaaccacccccccccctttttttttt

SEQ ID NO: 61846 - DNA, 389 bp, Homo sapiens
ctccaccgcggtggcagcggccgcccgggcaggtacttttttttttttttttttttttagaaaaaggaatttcttcttaacaatcagggggggggaaccgggggccatatcccaataccaaaagcccctcttcgtggggtcaccccctttttcagccccccctacttgtgctatctaaaacatagggacccgccggcatgactgggctaatattagacctttaccaaaaaaccaggtttttcgttgtcgcccaaagaggagaccccattctataccaagaaatatgctgattttaccgtcacaaatggggggatattagggggctaccaggctccggaatcatctaaaatattgtgactccccacggcggaaaaaaagaaccattagga

SEQ ID NO: 61847 - DNA, 231 bp, Homo sapiens
tccaccgcggtggcggccgacgtgccagaccctacagaaccaccgcatttgtaacaccacctacctgaatgaggcactcaggaaaatgggaccatattcaatatacgtgggaagccagaatcatgagcctcactcgctgaatacctcatggacaccaagaccttcatcgcttgcttatgacatcaacgatgagaacaactggaggctgcttagccttgctgacatagccag

SEQ ID NO: 61848 - DNA, 289 bp, Homo sapiens
acttttttttttttttttttttttttggccccttgggaagggagggagggggaattttggttaaaaatttttaagggggggaaaaaaaaaaattgaaagggttttgggggtattttggggggccccccccggtttttttatgggggccctttccttttaaaaaggggggggtttttttaattttaaaccaaaaagggtaatcccaaattcccttcccgggggcccttaaaggggggaaagggggtcctttagggaaaaaaccccccctttttaaaaaatttttggggaa

SEQ ID NO: 61849 - DNA, 330 bp, Homo sapiens
acttcttgatcgcttttattcttgaaattaatacaagaaggtctctcatttatgtgagttgaattgacaatccaatcctttgggttagctgatttagtaggtaatggtgcagcaggaagtttgagaaaattcagtttagaattgagaagggagctgataaaggacacatagctaggcagtgttggagatcagcaggaactagacacaatgaatggatatggcatcaatactcatgaacatgccattcttccagcagtgcttggcaactcaggttgaggaacagaagaagtggatggcttaggtaatggaatggatgctttttaatgtcag

SEQ ID NO: 61850 - DNA, 291 bp, Homo sapiens
actttttttttttttttttttttttttggaaaacccccaggggagccttaaggaaaatttttgaaaaaaaaattttggggggcttttccccaccctttttaccccggggttggggaaaaaaaatgggggggggccccaacccttttggaaaattttaaaaagggataaaaggggggtttttttaatccccccaccctttttttttttggggaaaaccctaaaaaggcaaaaaaaaatttttttccaaaaagggcccctttcccccccctggggggaaaaaaaaaaaaaaaa

SEQ ID NO: 61851 - DNA, 187 bp, Homo sapiens
acttttttttttttttttcttttttttgaaaggggagggggggtagctgcacaccttttaacccggggccctgctgttctgcccacaagggggttaaatttttaaacgccctgataaagggattgaacactcctcaaaagggtttgcctttttggaaaaacgaaatggcctgccatgggtattgatg

SEQ ID NO: 61852 - DNA, 317 bp, Homo sapiens
tccaccgcggtggcggccgagtactttttttttttttttttttttttttttgtttttttttttggggaaaaaaaaaggttttccctttttccccaggggggttttaaaacctgggggcaaaaaaaaccccccccccctttccccaaaaagggggggaaaaaaagggggggacccaaaacccccgccccaatttttccccttaattaaaaaactgggggggttttaaaaaaaaaccccccccccaaaactttttaaaggggggtccctttttttttaaaaaatttaaaaacccgccctttttttttcccccccctaaa

SEQ ID NO: 61853 - DNA, 298 bp, Homo sapiens
acttttttttttttttttttttttggggaatttccccctaaaaaaaaatttttaaaccctaacctttttaaaccttggggggaaaattttttttaaaggggaaaccttttgggctttggaaaaattttaaaaaaatcccgggccccccccccttaaatgccagggccccccccctttggggaaaaacaaaaaaattttccaaaatttaaaaaattttttttggggggaaaaaaaaacccccccccaaagaaaaaccatttttccttccggggggggcctttaaaaaataggggacccc

SEQ ID NO: 61854 - DNA, 196 bp, Homo sapiens
tccaccgcggtggcggccgagtactttttttttttttttttttttttttaaaaaaaaaactttttttttttgggaatttttccaaaaaaataaaaaatttggggggttttgggaagaatttaaaacccccccccccaaaaaaaaataacttccaggggggccaatccctttttttttttttttccccttccattcc

SEQ ID NO: 61855 - DNA, 198 bp, Homo sapiens
actttttttttttttttttttttttttttcccaaaaaaaaaattaaaatttttggggggaaattttttgggaattaaaaaaaaaaaaatttcttaaaccccccccccaatttccaaccgtaaaggggccttggaaaattattgccaatttttcccccccccttttaaaaaaatttttaaaaaggccctttttgggaaa

SEQ ID NO: 61856 - DNA, 411 bp, Homo sapiens
  misc_feature 16: n = A,T,C or G
acgcgggaggcgggcnagacacgaggccaggagttcaacactagcctgatcaatatggtgaaactccatctctactaaaaatacaaaaaattagctgggcatggtggcaagtgcctgtagtcccagctactcgggagactgaagcaggagaattgcttgaacccagaagggagaagttgcagtgagacgagattgcaccactgcactcaagcttgggggacagagcgagactccatctcaaaaaaaaaaaaaaaaaaaaagggcccccgggccctttaaaaaatgggggcccccccgggcgggagaaatttaatttaaacttttttaaaccccgccccccggggggggggcccggcccccctttttttccccttttaaggggggtaaaaggccccctggggaaaaaaaggg

SEQ ID NO: 61857 - DNA, 421 bp, Homo sapiens
  misc_feature 124: n = A,T,C or G
acaatattgaaagatatttgtctgtattttttaagtaaaagttttacagtttttcatgcattaagaactaaattcatttagagaatgaatttaagaactaaattcatattcatgaacttaaatngagaaaaaacaattacagtattattttcgctaacctctaagtgacataattatttgtatatgatgtgatgtcatggtgaaatttcattgcattcattaaggagaatcactttttccccagccctactcactgaatggttcctccttttcttacttatggaatatgctgcttctgccacatgttaaaatttatagtttacttacttcatccctgctccaggttctccgccttgtaattgttaagtgatcgggaggctctgctgcttgaggtcttggatcaccagatcgaccgttgttt

SEQ ID NO: 61858 - DNA, 342 bp, Homo sapiens
cgcggtggcggcgcgagtgctgctggtacatcctactatgccctagataaccactcaaaacatagattatccaacccaaaatgtccatagggctgaggctgagaaacccaattctagactgttctccacagtcactactgtcctttttttttttttaaaagtttactgtttaaaaacagggaatttcattttgttgcccaggctggttttaaactccgggttaaagcaatccttctgctttggcctcccaaagggttggaattacaagcttgagtccccatcccgggcctgtaactattgtttaacacaccataaacagaattcttttttttattttttttt

SEQ ID NO: 61859 - DNA, 540 bp, Homo sapiens
gggagctccaccgcggctggcggcgcgaggtacaactctcatgcaaatataaaatgaacacatgccaatgattttattcaactaattatttaatgcaggaaccactaaggtgttaaagccagttcaaagaacatttgagcagctagatatctataggcaatttatagaagaattttggataagattgttgggttagatacaaaactggttaataaacaacagggcaataaactgtaatattgaggttgtcttttccactggacagaaattatttgcatctctgctggacagaaactacaagttaacctctgcccctattgagctgtaaaatagcccaaccaatagaaagtcagacccctgtaatcccagtactttgagaggccgagatgggtggatcacgaggtcaggagatcgagaccatcctggccaacatggtgaaaccccgtccctactaaaaatacaaaaattagctgggcatgggtggtgcacgcctatagtccgagctactcgggaggctgaggaaagaagaattgtttgaac

SEQ ID NO: 61860 - DNA, 281 bp, Homo sapiens
actttttttttttttttttttttttttttttttttttttttttttttttttttttttttttttttttttttttggggggggttttttttttttaaaaaaaaaaaaaaaattttaaaaggggggaaaaaaaatttttttttcggggggggtttttttttttcaaaaaacccccccccccaaaaaaacccccccccgggggggggggggggggggggacccctttttggggggggccggggggggggggccccccccccaaaagggggggggggcgggggggg

SEQ ID NO: 61861 - DNA, 262 bp, Homo sapiens
acttttttttttttttttttttgggggaggggggggtaaccctaaacccttttttaattggggggtttttttagccccccttgggggggaaaatttttccctcttttaaaagggtttttcctaaggcccaaaaaacttttcctttttggaccaaccgttaaatttcccaggggttttaaagggtttttgggcccaatttaaaggtaaaaaaaaatttttttttggaaaacccatttttcccagggccgggggggtgggcccc

SEQ ID NO: 61862 - DNA, 148 bp, Homo sapiens
ctccaccgcggtggcggccgagtactttttttttttttttttttttttggggaacgggggtttaacctaaaacccttttttaatgggggggttttttaagccccactaggggggaaaaatttttcccccctccaaaaaggttttttcc

SEQ ID NO: 61863 - DNA, 242 bp, Homo sapiens
acttttttttttttttttttttaaaaaaacgggttttttttttttttcccggggggaactaaaatttgggggttaaaaaaacccccccccttaaccaaacccagggttttttaaaaaaagccaattttttaaattgccttttaaccacttttttttattcctaaaagggccaaaccaaaaaaaaaaaccttccttggaaaaaaacccccctttctttttaaaaaaacccaaaattttttttt

SEQ ID NO: 61864 - DNA, 581 bp, Homo sapiens
acttttttttttttttttttttttttttttaaccctttgggaaaaattttttttttgggccttttttgggttaaaaaaaaaaacccccaaaaaggggtcccccccttaattaaaactaaagggcttttcccccaaaaaaaatttttttttcccccttaaaaaaaaattttaggggaaattttttggggcccaaaaaatttttccccccaaaaaaatttttggggggggcccctttgggtggggaaaaaaaattttttttttttcccaaagggtttttcttttttcctttccaacccaaaagggtttttaaaaaaacccggggaatttacctttttttaaaaaaacaattggttttcaaaaaaatttttttttttaaaaaaaaacccccccggggggggggtttttccccctaacccttaaaaccccccccggttttttttttttcccccgggcccaagggaaaatttttaaaaacctttaaaaaggggcccctttttattttaaaaaatttttttttttaaatttcaaaaaaaaaacccctttttaccctttaaacttttttcccaaaagataaccccccc

SEQ ID NO: 61865 - DNA, 304 bp, Homo sapiens
tccaccgcggtggcggacgggtgcgatggctcacgcttgtaatcccatcactttgggaggccgaagtgggtggatcacctcagctcaggagattgagaccagcctggacaacatggcaagaccccgtctctggaaaaaaaaaaaaaaaaaaaaaaaaaaatgcctctggcctgtttaaaaaaaaggggaccccccgggctgggaaaatttattttaaatttttttaaaccccccaccccggggggggggcccggcccccctttttttttccttttaaggggggtaaattccccccttgggaaaa

SEQ ID NO: 61866 - DNA, 535 bp, Homo sapiens
ttggagctccaccgcggtggccggccgcccgggcaggtactataggatcattcagaggcagatgccttgccaaaaatatatcattgttaagtagatttactgcttaatgggaagagattcgttgctgcatgttagatggcatttttcatgtaacatcttttatgtatccccacaacaggaggtgttaattacaattcattcaacaaatatttcttgagcctgtgtgccaggcaccattccaaggtctgttagcagcctcattctctagaggcagagtatataacaataggacttgttgtagcctcaggccaagatgaattatgaaaaaaatattaaacttggtcttttggcatggaatgatttttgatacaatactggtcaagttctgtgacttccataattgcagagtgggtctgcagttgaattgaacaagattttgcctgaagtagaagtatcattgccatgattttatttcagtttttggtttcctcaaaatagagtttgctgaacttttagaaggaaaaaatggttcttc

SEQ ID NO: 61867 - DNA, 546 bp, Homo sapiens
actcttaaggcctgacctctgaagtaatcccagatatcattttccccatatggtattgggtcaaagcactcccagggccatcccaggttggaggggaaggcaaaaagactcagaaatggttggtgttcatctttggagactatttacacagtgattgtatattaaaaaaaacagcaattatatctttgaatttgagtaaagttaaagaaatggtatctgtgaaacttcgaataaacaagtggagcttaaaatatttgattcttgcatattaggttaatgtgctctatactaatcaggttggagaaatattaagctctgctaggaattctattggactgaaggtaagtcatcctgccagtaactacctaagtcaaggtgtgaacaagctggaatttcttcccattctaatttttttcaagtataccctgtagaaaacaaaatgaagaatcgggctcagaatcatttccaactacctatcacatcttttggaagcttcaagggtaagatattatggaaagcatgcttaaaaaaaaaaaaaaaaaaaaa

SEQ ID NO: 61868 - DNA, 273 bp, Homo sapiens
tccaccgcggtggcgaccggccggccaggcacgaactttatgatacaccttattcttgataaccgacgtgctaccaagatactagctgattggtgggctgcccttgatccagaggaaaaagcagaattacacggacatggcctaggagtataaagatgcatttatgaaagcaaatcctggctacaaatggcgtcctaccacaaacaagcctgtgaaatccccaacacccactgtcaatccacaaaagatactttgggccttcccatctgactc

SEQ ID NO: 61869 - DNA, 153 bp, Homo sapiens
tccaccgcggtggcggccgacgtacccggggagtgctcatgctttctgccggggtcggcagtcacggctagcgtctcgccagccgtaggatgaagatggcggtggtgtctctctttatctttgaggaatattaaataagtaccactacttccg

SEQ ID NO: 61870 - DNA, 294 bp, Homo sapiens
acttttttttttttttttttttttttttttttttgggggggcccccggggaaaaccccccctcttttggaaaaacccccccaaaaaacttttaaaaccccaaaaacttttttaaaaaccctttttttgggattttggggggaatttccccccccccccaaagggtgggttttttttaaatcccaagggtttttttgaaaaaaattttttcttttaaaaggccggcccaaagggaaaaggttttttggggggcccccttttaaaaatttcccttccccaaaatttaaagggttta

SEQ ID NO: 61871 - DNA, 234 bp, Homo sapiens
acttttttttttttttttttgggcccattttccgggcccccttttttaaaaaattttttccaaaagggtttaaaaaaaaaaatggggggtttttttttatttaaaattggggggaccctgggaaccaaaaattatccccaattttttcccctccaaggaaaaatttaaaatttctttttaaacccctcttgggcttggggccctttttttttttttacttgcctttttttttta

SEQ ID NO: 61872 - DNA, 349 bp, Homo sapiens
  misc_feature 38: n = A,T,C or G
gcgaacttcgtactcactctgttgtgcctaattggganctccaccgcggtggcggccgatgtactttttttttttttttttttttttttgtaatcccctctctccctttattatatactttatacctcggggggggcccgaaccccccctccagtttcctttactgaaggttaattgcccgcttgacgcaatcaagaggggtccctgttaactgttggggaatttaaaaaccccatttttttccttttaaggggaataaaaaaaattttttttaaccaaaaatttaaccccccccttttttctttaaaatccccttttggaaacccaactttttttttttttaaaaaag

SEQ ID NO: 61873 - DNA, 307 bp, Homo sapiens
actacagaggacatagcagtattaagggataatgaagtcacagcttcagagcctccatcctttctttagcaagttagctctacttgtatctgttctgttttatataatatgattgcatctaactgtttttaaaaaaaagttctgttcttcaaaaaaattttaagctatgaaaatcactgattaagtcaaaccctcattttacaaaagaggtaacacaaactcagagcacttatgcctcaccgtaggtcacaaagccaagtagctccaggccagaaatgggctttaggtcttccgtctgagactggcc

SEQ ID NO: 61874 - DNA, 299 bp, Homo sapiens
acttactaagtgccaagaacttctaagtgatttacatgtattaactcattacaataactccatgagctaactactatatttttacatataggaaattttacatataggagataggcacagaaatgttaagtgccttgcccaaaattgctcagcttgtaaaaatttgaatttaggcagtctggcttcacaccttgtgctattgacctctatgctatcaggctttaaatgcttaatttaattatagttaactttgcagaattgagaataaaagcaaggatgcaaactggcaatgtttaccc

SEQ ID NO: 61875 - DNA, 219 bp, Homo sapiens
ccgggcaggtacttttttttttttttttttttttccaaaaaaaacccccctttttttttccggttttggggtttaaaaaaaaatgggggttttgtttttaacccttggggttttttccccgggaaaagggggttttttttttttaattgggggggggaagcccccccctttgtttggggaaaatttttaaaggggtttttggcccttaccctttttttt

SEQ ID NO: 61876 - DNA, 155 bp, Homo sapiens
gaaccaacccccccccacccaagatgcggaatatttatatgtttttaaaaaaaagggggtttttttattttttaaagaaaacttttaatatctctcctcgtaaaaaccccccacttgactcccaaaaaagggatttactttttttcttttaaaaa

SEQ ID NO: 61877 - DNA, 129 bp, Homo sapiens
acttttttttttttttttttttttttttgaaaaagggtttttttttcccccccggttaaaattaagggggggggttttttattgaaacccccccccccaagggaaaagaaatttttccccccaaccccc

SEQ ID NO: 61878 - DNA, 306 bp, Homo sapiens
tccaccgcggtggccgtggtcgcggccgaggtacgcgggtgaaaaattattgagaatggcattgttttacattgttacaaatctctttaatgtctggctgaataaaagacagctagattttcgtaacttctaccttcattctcttacaatatcaatcatcatgtaacttttagaaaattgtgccatattgtgtgagaatgtgagtgaaaaagggatatgtcctaatattatgtaaattgttttgaaacagtgtcagggacacccaggagttcctgcaccacacttttgagaattacactgaattac

SEQ ID NO: 61879 - DNA, 199 bp, Homo sapiens
tttttggggaaatagtttttttctgttccagggtagaatgcaggggtttttttttcttttttttccccctttgcccccggggaaaaaaaattttttccccccccccctttaaaaaggggggtttcccccccccccccccccccggttttttttttttttttttttagaaaaacggggttttaccttttgggccgggggg

SEQ ID NO: 61880 - DNA, 472 bp, Homo sapiens
  misc_feature 297: n = A,T,C or G
tccaccgcggtggcggccgggcgcggtggctcacacctgtaatcccagcactttgggaggccgaggcgggtggatcatgaggtcaggagatcgagaccatcctggctaacaaggtgaaaccccgtctctactaaaaatacaaaaaattagccgggcgcggtggcgggcgcctgtagtcccagctactcgggagactgaggcgggagaatggcgtgaacccgggaggcagagcttgcagtgagccgagatcgcgccactgcgctccagcctgggtgacagagcgagactctgtctcanaaaaaaaaaaaaaaaaaaaaaaagccccctgggcccctttaaaaaatggtgggacccccgggggggggggaatttattttaaatttttttaaccccccccccccggggggggggcccggccccccctttttttcccttttagggggggtaaatggcccccgggggaaaaaaaggg

SEQ ID NO: 61881 - DNA, 292 bp, Homo sapiens
actttttttttttttttgggaaaggggggcttccctccccgaaaatttttgggttcccaaagagggccggcagccaatcccttaaaaaccttcccaaaaatgaaattttggacccctttctttttttttttcgggggggggttttttattcaaaaaaaaattccaatttttttttccaccccctttcccaccattggccaaatttttcccaaattttttgaaaaaaaaaaacccccccttttcaattttttcttagggggaaaaacccccgggttcccccccatttaaaaaa

SEQ ID NO: 61882 - DNA, 387 bp, Homo sapiens
actttttttttttttttttttttttttttttttttttttaaaaaagggtttttttttttccccccggtaaaagggggaggggcaaaaaaataaaaaggccccctttatttccgggggaaaaaattttccccccctttaattttttaaaccggggggaaccaagggcccccccccctttccaaaggtttttttttgtttttttgggggggttttttttttttttggggggggggtttttaaaaaaaaaaaaggttattttttttcccccagggtttttttaaaccccggggccaaatggttcttattccccccccccccaaaagggggggataaaaaaaaaaataaccttggccccacatttttatttttttttcttaaaaaaaaaaa

SEQ ID NO: 61883 - DNA, 277 bp, Homo sapiens
acttttttttttttttttttttttttaaaccctgggaattaaggggggaaaatcttccttttgaaaagggccttttgaaaaaaaggggaaaaagggaaaacccccccatttccttaaaaaaaaaaagggttggggtgaaaagggggccccccctttgggggtttttaaatttggggggacccttttttaaccttccccccaaaaaaaacctttgggggtgggggtttttttttttaaaaatggggccctaaaatttttccccccccctttttaaaag

SEQ ID NO: 61884 - DNA, 556 bp, Homo sapiens
  misc_feature 486: n = A,T,C or G
ctccccgcggtggcggccgtccgactgtcataaccattctaaagcataattatctttcgctttatcacactgttcctgtgggatggggacttcaggactggcttagccgcctgatttgggggtaaggtgtccgctgagtttgcactcaagattgcgggtgaagtggcagttatttgaaggattgtccagggctgaagttttgcttccaagatggctgactcacatgtgtagaaagtttgtgtcagctgttggcagaaagcagtttctcttcatatgtatctttccataggctacttaagtgtccatgcagcatgacagtaggagtcttttagagtaataggagagagaaaccaggagaaaagccacaatagcttgtatgacctagcctcagaagtcccactccatcatttttgcaatatccgactggatggataagcacagggtataacctcaatgaaatgttcattttgaggatactataaattntatcattcatactagaccagaacacatattattctcttggaaaactagtcaaagggtgccatcattaatt

SEQ ID NO: 61885 - DNA, 293 bp, Homo sapiens
actttttttttttttttttttttaaaaaagagagaatttttccttttggccccccggggggaggccaagggaaaaatttgggccaaaaaaaaccccccttccgggggtaaaaaaaaaaaaccctttttaaaaaacctccttttccttttccggttggggcccccaaaaaaaaaccccccccttttaaaaaaaatttaaaaaagggggccaaaaacttgggcttaccggttttttaaggcaaaatttttttccaaaaggggttcccccccccaatttccccctttaaaaaaacc

SEQ ID NO: 61886 - DNA, 313 bp, Homo sapiens
ctccaccgcggtggcggcgcgagtactttttttttttttttttttttttttctgcggccccatttgatccaatattttttttagcggccccctccgcctttaaaacataccttctagggggccctccattgggggaaatttgctctctcgaaaaaatcatggttgtgtctgttttctgcggtttaaaaaaaaagggggaaaaaaaaaaaccccaaaaaaaaagggggtttccgggcccccccttttttacccttttaaaaaaaaggaaaccattttttttttgggggaaacccccccccgccaaaaaaaaagg

SEQ ID NO: 61887 - DNA, 337 bp, Homo sapiens
tccaccgcggctggcggcgcgaggtacagcttcagactttccctgctgagcccagcacttcaagtgtccccctgctgaatgaaacttttcaccagcagaaaggtctgggagtcaaggcccattgtccagaatcttttgatccatggggtgttcccttgatgtgatacactcttccttaccctaggagtaggagtccttgaacaccagactactgtgaatgctattgctcctctgggtctagccacccagtggggctgccacactttaggcaggtgctggaaaatgtctacaagggatgcaatgatattacctatcctcaagtctcccagcagcaagt

SEQ ID NO: 61888 - DNA, 288 bp, Homo sapiens
acttttttttttttttttttttaaaaaaaaggggaaaaccctgcccttgggggggggaaggaaatttaaattttttttaaaacaattttaggccccaaactttttgaaaaaaaattttaaaccaaaaaaaattccccctttttccaacccctaaatgggctttggggcccccccccccataaaaacttttaccccctttaaataaaattttgggaaaaaatttaaaaaggggggggcctttggggttttaaggccccatttttttttaaagggttttttttgggtttt

SEQ ID NO: 61889 - DNA, 177 bp, Homo sapiens
  misc_feature 2, 3, 4, 5, 6, 7, 8, 9, 10, 11, 12, 13, 18: n = A,T,C or G
annnnnnnnnnnnttttnttttttaaaaaaaaaaaaaattggtttaaaattaaagggccccaaaaaaaaaatcctttttttaaaaaacgcgttttttaaaaaaaatttttttttacccccccctaaaaaccccaaaatttttcccaaaggggaaacctaaaaaaataaattctcttt

SEQ ID NO: 61890 - DNA, 502 bp, Homo sapiens
acagattccatgtgtttgtttccattgaatatacagaaatactgaatacttccttaaaacagcttttattgaaaaaaggaagctgataaaaatcactttgcttttttataaaaacgcttgataggattacctttctagagagacttctgtgtatggccacacttatccaccacagtttttgtttatatagagagcattttaaaaagaagaaggttttcctggccatgcacagtagctcacgcctgtaatcccagcactttgggaggccaaggcggaaggattgcttgaggccaggagtttgagaccagcctaggcaacattgtgagactgtttctacaaaaaaaaaaaaaaaaaaaaaagcccccggccccttttaaaaattggggaccccccgggctggagaaatttattttaaattttttttatcccggccacctggggggggggcccggcccccatttttttttccttttaaggggggataatcgccccccggggaaaa

SEQ ID NO: 61891 - DNA, 566 bp, Homo sapiens
  misc_feature 494, 511: n = A,T,C or G
tccaccgcggtggctggccgcccgggcaggtacagtgaatgtttgtaaaaattcttctatgattcaaccagagatcattggcaaagaacacatgatcaatcatttctggttttctatttctttcagcagttccataaactgcttcaagaatccaagatgttttataactggccagagttatgagctgagatgtaaaaaatcattaaaacaatttttttggccattcttattttgagtgactaatttcattgatctgtttttgactgtcgaggggagatggcatcaaattcattatgtttttgctgaaattgtctgttaatattttctgctttattatctttgactttttatgtaacacacagctttctccttttgctctgccacagcaagttataattgccattgattatgttgctttttgcttaccttcctctcctgtctctttttttcttgactgttctgattgtattattaatttctgtgtctccactggnatttgtatcagtcctanagctttggaaagtgtctctgtgttaggactgctacaaaattttcaaagtgataaa

SEQ ID NO: 61892 - DNA, 163 bp, Homo sapiens
tttttttaacttttttcttgggaacccttgacccctttaaaaacttttaaaggggtgaccccttttggcaaattggccaaaaccaaaagccaaactttgggttattttttccagggtcaaaaaaaaaaggggaaaaaaaaaaaacctaaaatgaaagggggat

SEQ ID NO: 61893 - DNA, 392 bp, Homo sapiens
actttttttttttttttttttttaaaaaaagaaatttttttttttcccccaggggggaagggaaggacctttttggggctaaattaaaaccccccctttggggtaaaacccattttttttccaaaaccccgaaaattgttggaaataaaggcccccaacaacccccccaaataattttttgcatttttaaaaaaaagggggtttcacctttttaccccaggaggttttaacttcctaaccccaaaaaccccccccccgggcccccaaaaagggggggaataaagggtaaaaaaaacgcccctgcaaccccggttcccttggccttttaaaaaaaaagagaccccccgggcttgaaaaatttaaaaacaactttaagcaacccccaaacccaa

SEQ ID NO: 61894 - DNA, 289 bp, Homo sapiens
acttttttttttttttttttttttttggggggggggcccaattggtttaaccaggggggcccaaaacccgggggaaaaaaaaaaccccccgccaaaacctttgaaaaagggggcaaaaaggggggcccccccggcccccgatttaaacccctttttaaaaaggaaaaaaaaaggggggaaaatttttttcccccccccccaaagggttccaaaaaaaaccccctttccccaggggaattttttaaaaaccctttctgggggggggggttaaaatttttttaaaaaaacc

SEQ ID NO: 61895 - DNA, 533 bp, Homo sapiens
agtactggtatctatgcacatgtcttttctgcgtcttttgtagatgagtatcaggttacctttttgggcgttccactgtaccgaggaataaacttacctttaccgttggttaaaagggcaactctaagtcctctttgtgattagctagaaccactgtattcctaggcctgagttttattttgttgacccaaaattaaattaaaaggccaaccgtgggggcatgtccctgtagccctagttgctgaggtaaaaggattgcttgaccccaggatttcaaggctgcaccaagctttgattgccccactgcactccacccttggcaacaaactaaaaccctgtctcaaaaaaaaccaaaaccgcccaaaaaaaaaaaaaaaaaaaagcccccccggccccctttaaaaaaaaagggaaccccccggggggggaaaattttaattaaacttttttaaacccccccccccggggggggggccccgcccccccttttttttccctttaagggggggaaaatcccccccggggaaaaaaaa

SEQ ID NO: 61896 - DNA, 494 bp, Homo sapiens
acttttttttttttttttttttttttaaaaaaaaaaattttttttttccccccagggggaaagaaaaggggggggttaaaataaatttaaaccccccccttgggggtaaaaaatttttccccctaaccccccaaaagtgggggaaaaaagggcccccccccccaaccggggaaattttttttttttttaaaaaaaaaaggggttttaattttttgggccgggggggtttaaaaccccaacccttgaaaaccccccccttgggcccccaaattttttttttttaaaaaaccctttttaagggttactttccaaaacaatgggggcccccccccaaatttttgcaagggaatggaaagcccaaaaaaatttttttggggggggttttttttgggggttttttttttttaaaaaaaaactttttttttttccccaagggggggagggggggggccaaaaaaaattttggtgaaccttaaaacctgggggtaaaaaaa

SEQ ID NO: 61897 - DNA, 198 bp, Homo sapiens
actttttttttttttttttttttggtttaaaaaaacaaactgggtccccgggggaggggcccttaaaccaggggaccccctgtcccaaattttccccttggggccccaaacccccttttttaaaaaacccctttttttttttaaaaaaacccttttttccccggaaaaaccttttgggcccccccccccccaaaaaaa

SEQ ID NO: 61898 - DNA, 501 bp, Homo sapiens
tccaccgcggtggcggccggggatatcgtgttcttgcggctgagtggtgctctgctgcgcatccacctcggtgccccacaataaccccaacagtaaccctgtatacagtcagctgtattcacaggccagacacaagaggaaaaaggagagggaaaaggctactcaggagtcacaggcatagaatgctgctggcgcatacgcctgctctctttccatttaaagtcaaaaggaaaacagaggaaagaatgcacaagatgtggcaagaaaaaaactgaaaccgtattactttacactaatttaaggcagctgtataacctatatattaggaggcagagagagttcaaatgacagaaaagaggtagtatatggactaaacaagaatacgtgtttaaatatttaaagaacttctgaatcttgatatgtgaaagtcagtaataaaaatgaaaattgatgaagtagttactatatctttctttcataagagactaggataagaaaagt

SEQ ID NO: 61899 - DNA, 274 bp, Homo sapiens
acttttttttttttttttttttttaaaatttttattttaaaggggaaattttttggaattccctttttaagcccattatttttgggaaaaattgggttgttttttttttttccacccccccttttttttttccccttttaaattttgggaatttttttttttgggggggattatttttccctttgttaaaattaaagtttaaggggggttttggtcctttttttggggggattattaacccttttcttttttgccatttttccatatttgcccc

SEQ ID NO: 61900 - DNA, 133 bp, Homo sapiens
tccaccgcggtggcggccccgagtacttttttttttttttttttttttttaaagggcgaccctttccaaaattttcctttggaaacccttgacccttttaaaaacttttaaaggggttaccccttttggcaaa

SEQ ID NO: 61901 - DNA, 299 bp, Homo sapiens
acagtatgggcaagtgggagttaatttataaccaaggatcagggtggggttggtgggtggaaaaatcacaaagagaaaacatcaagggtaagggggattctggctaaaccaaccaaacaggattcttgctgaagacaggctgggtgatcagacatcacctgtggcacggtggaggctgaggaacccgatcagatatccagagtgatcagataccgagggtgggaggttctggctaaactgactgagcaaggtttttttgctaaaactggattttacaaggaaatgcacagatggcctac

SEQ ID NO: 61902 - DNA, 444 bp, Homo sapiens
  misc_feature 17: n = A,T,C or G
tccaccgcggtggcggnccgagtacttttttttttttttttttttttggggggggggtttttaaaaaaaaaaaaggttttttttttttcccccgggtttttttaaaccccgggcccaaaagggtttttttccccccccccccaaaaggggggggtttaaaaaaaaaaccctttgccccccccccgggttttttttttttaaaaaaaaaaaaaaggggggccaaccttaagggcccccaaaaaaaggccgttttttttttaaaagggtttttttaaaaaaaaatttttttttcccccccccaaaaaccccaaatttttccccaagggggaacctaaaaaattaaattttttttttttttcgggaacttgcccccttgttaaaatttcacatttttttttttttcccttcccgggggggccttttaaaaataggggaccccccggg

SEQ ID NO: 61903 - DNA, 197 bp, Homo sapiens
actttttttttttttttttttttttttttgggggatgcggtagttctacaacaaccctcattaaaggggagctcctttttacgcccccttgagggaaaaaaaatttccccctttacaaaaggattttcataaatgaaaaaaaaattttttttttttaaaaaaaaaataaaattacaaggggtttttaagggtttttg

SEQ ID NO: 61904 - DNA, 144 bp, Homo sapiens
aaaaatagctgcctttctggaccaacaattaaatttacagggggttttaaggggttttgggggcaaatttaaaggtaaacaaaaatttttttttggaaaaccaatttttaccaggcctgatgggtttgcccccctcccctaaaa

SEQ ID NO: 61905 - DNA, 300 bp, Homo sapiens
actttttttttttttaaacttttcctaatttctcccaaacttaaacaaaaaaaaacttccaaacctgaaaatggatcaggctttgctactcatccataataaacttttttggaccaacttgaccgtttactgaaaatctgaatgctgttatcacgtttgtttcagttcacactcatttctgtttgcttgggggcttgttggatataaccctaaatgctctcatgtctaaagcccttcacaagttaatttcatttttgcagctaaaaaaacaaaaaacctttttaaagagtcggaaaaaat

SEQ ID NO: 61906 - DNA, 551 bp, Homo sapiens
  misc_feature 479: n = A,T,C or G
actctgggatatttctgccttcagacagtcatgatgttttctgtgggttaaggcaaggacaaatctccccccagggaacccaagaaggtggagaagctggttgaacacctcaatgtcactttttccagtgtagaaaccatgagttgaggggagattttccatacacttggtgctgggcagaataggaggaaggagagtcatggatgtggaagtctgattctcaaagttttttcacttctctgtggctccgggaactgtctcatcctcacatgtgagctctgggttgttgttggtgtagatattggtgctgtatgtttggttttggttttctgtgagagggagtaaagccagcctgcctctatgcccctattttaaaactggaaggcatcttattgttactttattgatgcagtatcttcttgaatctttatgaaaatagaagtaagagcttccgatgagttctgttctaagccatagcnttttttattctgggattattattttctttgttcatctttgcatatcccttccatattttaggttctttttaa

SEQ ID NO: 61907 - DNA, 518 bp, Homo sapiens
gggactccaccgcggtggcggcgcgtccgggacatgtactatcttcctttctaaatgatatcccaccacaggcattcctatttctaaaacggccgagaggggcccggaacgcccattttgcttccttttagtaaggtttactgcccccctagattcaatcttgatcaatatggagacacgtactactcccatacacctatgggaattcaggttctccatatgcgggcgcatcattgaacagggggggaaacttctcctttcttatcgagaggaagtgacaccattgtctgccatttgccattcacgatctcgttgaaacctacagcctcacacccatcaccggggcacaagtaaacacatatttcacggcaggggaatactttggtgccgctattcctttcagttgccacaagtcagtttccctaaaggctgccctattagtggatgggtgggtgggaacctcaatgatgtatttcctgtgtgactcacagcctttcaaaatgggcgtgaccccttgc

SEQ ID NO: 61908 - DNA, 309 bp, Homo sapiens
acatatagatgtgtatctaaaacacacacacacacacacacctcttcagcctttgttgtatctgcaaaatataatttccatttttccctttccctaattaccacctaataacatgccctgcataatcttgcttacagtaagcatttcaaggaatatttatgaaatgaatgaataaacaagtgagcaaagcttctgaaacatataaacaataatcttatgtaaccataaacttagatcctgaaaagctgtatgtgacttgtcacaccaaagggctcaagttcaaacaaacaaaccaagaagggacaaaaa

SEQ ID NO: 61909 - DNA, 287 bp, Homo sapiens
actcagccaacctggtattcttaatgcctggaagataatatctattcaccaggcttttgtggtagcaatgtagccccaagattaggaaaattactgaatttagagatggatgcaatctttgaaactaattagctaattgtttgagggctgaaaggtaaagtgacccaaccattcctttagatgattgactagaaagggagctagaacaggaaggtcaattttatactgtaacagtggctaggcttggtggcatgtgccggtagtctcagctgctcgggatgctgagg

SEQ ID NO: 61910 - DNA, 220 bp, Homo sapiens
cgcggtggcggccgaggtactttttttttttttttttttttttccccttttaaaaattggaaaattttttttttgggggggattttattccccctttttaaaaataaagtttaaggggggtttttggccctttttctgggggaaaaaaaaccctttttttttttggaattttccccatagcccccccttggccccaaacccccttttccggggccccccc

SEQ ID NO: 61911 - DNA, 319 bp, Homo sapiens
actttttttttttttttttttttttttttgggggggggttttttttttttttgtttggttttttttaaaaaaaaaaaaggttaacccctcccccccggggttttttaaacccccgggcccaaatttttttttttcccccccccccaaaaagggggggacccaaaaaataaaccccctcccccccgccgggatttttttttttaaaaaaaaaaaaaaagggggtccaacctaaaggcccccaaaaaaaaacccctttttttaaaaaaagggtttttaaaaaaaaaatttttttttcccccccccaaaaaacccaaatttt

SEQ ID NO: 61912 - DNA, 298 bp, Homo sapiens
acttttttttttttttttccccaattttggggaaaacccaattgatatttgatacccaatttgaaacattttcaccaaatttgtaaccattttgtttgtttattgggggtaataaagtttttcatttttggaaataaataacctgtttttacttcctccccctgaattcgttttgaaaatgtaaagttgggatgtgtaactgaggcgggggggagttttcagtttttttttttggggggggggggggcaaaatatgtttccagtttttttccctttaggtttgttaaaaacccaaaag

SEQ ID NO: 61913 - DNA, 559 bp, Homo sapiens
actttttttttttttttttttttttttaagggggccccttcccaaaaatttttctttgggaacccttggcccttttaaaaacttttaaaggggtgcccccttttggccaatttccctttcccaaaaaccaacccttgggtccttttttcaatggccaaaaaaaaaagggggaaaaaaaaaaccccaaaaaaaaagggggtttccgggcccccccctttttacccctttaaaaaaaatgaaccaattttttttttgggggaaacccccccccgccaaaaaaccaaagcctgggttttttttaccccttaggggttttggggggttaaaaaaaacccccaaggggcccaaaattttggggccttaaggaaaaaccccccttttcccaggggggggttaccctaaggggtttgggtttccctcggggcccttgtttcctttggggaaaaacctttccgggctggggccactttaaaaccaattcccttggggggggtttttttaaccccctttttttaaaaaaaaaaaccctggcccctttaaaaataagggatccccccgg

SEQ ID NO: 61914 - DNA, 559 bp, Homo sapiens
actttttttttttttttttttttttttggggcccccctttacaaaaatttttttttgggaaccctttgcccttttaaaaacttttaaagggggtccccttttttggcaattttctttaaccaaaaaacaaacttttggttttttttttcagttttaaaaaaaaaagggggaaaaaaaaaaccccaaaaaaaaaggggtttttttggccccccccttttttcccctttaaaaaaaaaaaaacaatttttttttttggggaaaacccccccccccaaaaaaaaaaaggctgggttttttttacccctttggggttttagggggataaaaaaaacccccaaggggcccaaaattttggggcccttgggaaaaaccccccttttccccggggggggttccccttaggggtttgggttttcccggggggcctttgtttttttggggaaaaacccttccggggtgggggccttttaaaaaaaaatctttgggggggggttttttttaccccttttttttaaaaaaaaaaacccccggccctttaaaaataaggggcccccccggc

SEQ ID NO: 61915 - DNA, 314 bp, Homo sapiens
cgcggtggcgagccgcccggcgcaggtacctttttttatttttttttttttttttgggcctttggaaaaggggggggggggaattttggttaaaaatttttaagggggggaaaaaaaaaatttgaaagggtttggggggaaatttggggggccccccccggattttttaggggggcccttcccctaaaaaaaggggggggccccctaaaccttaacccaaaaagggaaacccaaaattaccttaacaggggccctaaaaaggggaaaagggggccctaaaggaaaaaaccccccccttttaaaaaatttttagg

SEQ ID NO: 61916 - DNA, 285 bp, Homo sapiens
tccaccgcggtggcggacgcgagtacttttttttttttttttttttttttccggcagggggggggatccactaaaccctatatcaaacggcgccgcttttgagccccaactttgggtccaaatattgaaggttaattgcagcgggtttttgtaatcatgccaaaaaatgttttcttttttgaacaaaaattaaattttccagggggtttaaaggggtttgggggccaatttaaaaggaaaaaaaaaattttttttggaaaaaccctttttccccgggcggggggg

SEQ ID NO: 61917 - DNA, 419 bp, Homo sapiens
acttttttttttttttttttttttggcgggggggtttttaaataaaaaaaaagttttatttttatccccaggttatattgaactttcagttcccaaagcacaaaattccccccccccccaaaaggttgggtaataaaaaatttacccattccccccaccttattttttatttttttaaaaaaaaatcacctggggccaccgcttaagggcccctaaaaaaatcccgttttttataaaacaactttttattaaaaaaaatgtttttaacccccccccgaaaaaccccaaaattgtcccaaatttggaaataaaaaaataaaatttttgtttttttttcggggactatcccaattgaaaaaaatccccactttatattattgacccgccggggggggcctttaaaaaattgggggaccccc

SEQ ID NO: 61918 - DNA, 357 bp, Homo sapiens
actttttttttttttttttttttttttttaaaaaaacaccccacccaaaaaatttttaatttaaaaagggtttgggaaaaaaacccagggggcccaaataaaaaatttggggcccccttttccccttggggggggaaccaaacccccacccatttttttttgccccccccaaaattggcctttggaacccccccgattttttttatttgggtttggggccccttttgggggtttttggggggtttttttttttaaaaaaacccattttttgaaaaatttttgggggggttatttttttttggcaaacccggggaaattaaaattttccccaaccccgtttttttcccccccccaaaa

SEQ ID NO: 61919 - DNA, 319 bp, Homo sapiens
acttttttttttttttttttttttggggagaagagaattttttttttataaccccaaggtggaaggcaagggggtaaatttggttaaaaaaaaccttttccctcggggtaaaaaaaaatttcccccccaacccccctaaaaaactaaaaattatgggggggccccaaacggccctttaaaaaataagggaacccccgggccggaaaaatttaaattaaaattttttaaaccccccaaccctgggggggggccccgcccccaattttttttccctttaagggggggaaaatccccccctgggaaaaaaaagggaaaaatt

SEQ ID NO: 61920 - DNA, 381 bp, Homo sapiens
acttttttttttttttttttttttttaacccccccaaaaaatttttttcaaattttttttgggtaaaaaaaaacttttaccccattccccggggggttttaaaggggggcccccaaatttttccccctttcccggcccttttttttaaaaaaattttcaccaaaaaccccttgtttcccctttaaaaatgccggggaaaaaaaaacaattttttttttgccccctttaaacccctttcccaattttttcaaaaaaccattttaaaaggggtttttttccccctaaacccccgggctttattgggcccaaaccctattttttaaaaaaaaacccaatttttattttttgggggaaaatttttccacttgtttttttttttaa

SEQ ID NO: 61921 - DNA, 241 bp, Homo sapiens
actttttttttttttttttttttttttttaaaaaaaaagggtttactctttcccccacgggtggtttaaaaatttggggtttaaacatttcaaccccttttttttccaaaaggttggggtttcccgggggtgccccccccccccaaaaaaaattttcttttttttttttttttttttttttaaccggtttaaagggccccatttggaaaaacgtttttttttttttaaagggggggggggg

SEQ ID NO: 61922 - DNA, 135 bp, Homo sapiens
actttttttttttttttttttttttaaaaaaaaaaaatccccttttttcccccgggtgggggggaaggggccaaatttcgttaatgggcccctaaaacccgggggtttatgcaatctttttgcctaaccccccaa

SEQ ID NO: 61923 - DNA, 305 bp, Homo sapiens
actttttttttttttttttttttttgggaaaaaaaagggatttttttttgcccccaatttaaaggggaaaacccaattttggggttggtaaaacccccccctttgggtaaaaaaaaatttttttttttaaccccccaaagggggggggataaaagggcccccccccccccccaaaaaatttttttttttttttaaaaaaaggggggttaccctggggggccgggggggtttaaaacccccaacccgggggggattcccccccccgggcccccaaaaagggtggtaaaaaaggggaaaaccccctt

SEQ ID NO: 61924 - DNA, 225 bp, Homo sapiens
acttttttttttttttttttttttttttttctttttttttttttttttttttttttttttgggaaaaaaaaaaaaatttttttggccccccaaaccaaaaccccggggtttaaaaccccccccttttttataaaaatttcttcccccacgtttttgggggggtgttcacacacaaaaaaaaaattttttttttcggggggggggagggggggttttttttttttt

SEQ ID NO: 61925 - DNA, 200 bp, Homo sapiens
acttttttttttttttttttttagagggggcccaaaccccaaagcttttttggtcccagggggggaaaaagcggggggccccctttgcgggttgggggggcaagatggcccccaaatctttggcccggaccaagggtgggcccccggaggaaccccccccccccgggttcccccccttttggggggggtttcccaggggg

SEQ ID NO: 61926 - DNA, 545 bp, Homo sapiens
acctctatgagtctacaaaaaacacagcgatattaggcttcggtcccaagtcccttcaaatacctggaaagccttctcaactaagatggcacaaataagcccagactgcaaatactacaataaatacctaactcttcaatccccagacaccaatgaatatccgcaagcatcaagaccaccgaggaaaacatgacctgaccaaatgaactaagtaggtcaccagggaccaatcctggagaaacagagccatgtgacctttcagacagagaattcaaaatagctgttttgaggaaactcaaagaaattcaagctaaaacagagaaggaattcaaaattagatcaacttaacacagaaattgaaataattaaaaagaatcaaacagaaattctagagttgagaaatgcaattgacataatgaagagtgcgtcagaatcacttaataacagaactgatcaagtggaagaaagaatgagtaagcttgaagacagactgtatgaaaagacacagtcaaaggatacaaaaaaaaaaaaaaaaaaaaaaaaaa

SEQ ID NO: 61927 - DNA, 513 bp, Homo sapiens
tccaccgcggtggcggccgagtacttttttttttttttttttttttttttaaaaaaagggtttttttttttcccccgggtaaaagggggaggggccaaaaaatataaaggccccctttttttccgggggcaaaaattttccccccctttaattttttaaaacggggggaacaaaggccccccccccccccccaaagggggtttggggttttttgggggggtttttttttttttttggggggggggttttaaaaaaaaaaaaagttttttttttttcccccgggtttttttaaacccccggacccaaagttttttttaccccccccccccaaaaagggggggaaaaaaaaaaaaaacctttgcccccccttttggttttttttttttaaaaaaaaaaaaaaggggggcccaaataaaaggcccccaaaaaaaagcccgttttttatataaaaggtttttttaaaaaagattgtttttatcccccccctaaaaaacccaaatttttccccaaagg

SEQ ID NO: 61928 - DNA, 247 bp, Homo sapiens
  misc_feature 188, 189, 190, 191, 203, 204, 205, 206, 207: n = A,T,C or G
acttttttttttttttttttttttgggggggaaaaagggtttttttaaaaaaccaaaacaaaggtttttgaaaaatttcccaaagcctgggggtaaagggttaaagtttttgaaaatttttaaagggggttaaaaaaaaaagaaaaaattgcccttggggaaaaaaaataaaaagggggggggggttnnnnaaactttaaaannnnnagaaccttaaattttttaaaaaaaaaaggggcccggtttt

SEQ ID NO: 61929 - DNA, 237 bp, Homo sapiens
acattaaaggacaaatagttgataatgtgaattagggaggggaaattggcatttgggaatgtcagaaggaactggaaatttagtattttactgcaagccagagttaggctggaggaatgggaaatggggagaagtcttgagaccctgcttgagacagaagtgaaaaatgcagaggaaaatcagtgccctgtggagtgtgaaaataattaagtggcaggcaattagactgaggtggct

SEQ ID NO: 61930 - DNA, 398 bp, Homo sapiens
ccgggcaggtacgcgggtattcaccattctagacgtcattaagaaaattcatgattatgtcaggagtccaaaataccaacattaacaaaagtttggaagaagtttattccaactcttatggattactttcagaagtttaagacttcagtgaagtaagtaactgcagatgtggtagaaattaaaagcgaactagacttagaagcggagactgaagttgttactgaactaaaatctcatgataaaacttgaatggatgaggagttgtttcctatggatgagcaagaaagtggtttcttgagatcaaatctactccgggtcaagataagatcacaccactgcactccagcctggtgacagagcaagactccgtctccaaaaaaaaaaaaaaaaaaaagtcc

SEQ ID NO: 61931 - DNA, 293 bp, Homo sapiens
  misc_feature 38: n = A,T,C or G
acactatgctggcagaaaggccaaaccatccaatgtgngaaaaactagagagaccttgaaactacacgaataaagagatgcctggacagcacctagctgattcagcctgtcactgttccaaatgcagacaccatctgactgcaaatgcatgagagaccctaaactagaattgcccagttgatgcctgccaaaaatcctggcccacagaaaccttaaaaggtgataaaattgttttgttgttttaatctactaagttttatggttatttgttaaaaagcagtagataactggaa

SEQ ID NO: 61932 - DNA, 277 bp, Homo sapiens
acttttttttttttttttttttttttttttggggggccccccccccccctttgaaaaaaaccccaatttttattgggggttttttttttttttcgccggcccccggggaaaaaaaccccccccggggaaaaaaaaagggttttaaaaaatttcccccctttaaaaaaaaaaccttttcccaaaaaaaacgggggggtcccactttaagggggtttttttttttaaccctaaaaaaaaaggggtttttttttttttttcccccccccgggggaaaaaa

SEQ ID NO: 61933 - DNA, 353 bp, Homo sapiens
acttactattaacatgacttatcactgttggtgtagaccttgaccacctggctgaggcagtgtttgtcaaggtttctccactaaaaaatgaccctttgttcccccatgctgccctctttggaaagatctcactatttgcagcccacacttaaagagtggagaactacactccatctctcaagagtggagtatctacatccgttgtttggaattcttcagcatgggatattctttttttattttaatttttaaaatttttttgttttatttcaataggttcttgggggaacaggtggtgtttggttacatgaataaattctttagtggtgatttctgagattttggtgcaccca

SEQ ID NO: 61934 - DNA, 453 bp, Homo sapiens
actttttttttttttttttttatggtaaacccggcttgttttatattgattgacgttaaccttggaaaggtttgccccctcccaattctcttaccccaaaaccccccaaaggtataacttgtttacatggtaagccggatttcccgggaactctggatgatatacctagccccggaaaaaaattttttgcatttcctaatcccaaaaaaatttttttttaaaatttgccccaccaattttttaccaaggaataacccaccgggcctttttaccgggtggttttgggaagggttccgagttaatccttggggccttataaaccaaggggacccccgggccggaggaattggatacaaaatttttgtacccccgccaccctagggggggggcccgcccccaacttttggtcccttttaggagggttaaatggccccctgggctaaaaggggggca

SEQ ID NO: 61935 - DNA, 431 bp, Homo sapiens
acttttttttttttttttttttttttttttggggaaaaaaaaatttttttttttttcccccggggggaaggaaagggccaaattttggttaaacaaaaccttttcccccaagggaaaaaaaaaccctttttcctaaacccccaaaatgggggggattaaagggttaccttgccccccccaaataattggggtttttcctttgggggaggggggggttaaaacccccaaccttaaaaattccccccccttggcccttttggaaaaaaaaccccgtttccttcccggggggcctttttttaaaaaaaaagggaccccccggggtggagaaatttaatttaaacttttttaaaccccccccccctgggggggggccccgccccccattttttttccttttaaggggggtaaaatgcccccttgggaaaaaaaag

SEQ ID NO: 61936 - DNA, 224 bp, Homo sapiens
acttttttttttttttttttttgggggaagggggggtaaacctaaacccctttttaattggggggcttttttaacccctccttggggggaaaaattttcccctcttttacaagggtttccctagtgccaaaaaacctttcccttttggcccaaccattaaatttcccaggggatttaaaaggtttttggggccaatttaaaggtgaaccaaaaattttttttgg

SEQ ID NO: 61937 - DNA, 119 bp, Homo sapiens
actttttttttttttttgaaaagggattctccttttgcccccgggtgggagggcagggccttaatttgggttaatggaattccccccctccagggtaaaaaaatttttctttcttaacc

SEQ ID NO: 61938 - DNA, 631 bp, Homo sapiens
  misc_feature 453, 454, 455, 456, 457, 458, 459, 460, 461, 463, 464, 465,466, 467, 468, 469, 470, 471, 472, 473, 474, 475, 476, 478,479, 480, 481, 482, 483, 484, 485, 486, 487, 488, 489, 490,491, 492, 493, 494, 495, 496, 497, 498, 499, 500, 501: n = A,T,C or G
  misc_feature 502, 503, 504, 505, 506, 507, 508, 509, 510, 511, 512, 513,514, 515, 516, 517, 518, 519, 520, 521, 522, 523, 524, 525,526, 527, 528, 529, 530, 531, 532, 533, 535, 536, 537, 538,539, 541, 542, 543, 544, 546, 547, 548, 549, 550, 551: n = A,T,C or G
  misc_feature 552, 553, 554, 556, 558, 575, 581, 587, 591, 605: n = A,T,C or G
tcaccgtcgattcatgcgtacatcactctgttgtcctggattggaagctccaccgcggtggcggccgaggtactttttttttttttttttttttagggggagaagggggcccaattaatttttttccccccccttaaaaattaaaactttggaaaaccccaaaattttttcaaaaaggagggcaaaattaggggggggttttttgccctttggttggggttttttttttttttaagaaaccaaaatttaatattgggggggttcccccttttcccctttgaaaaaaaccttcccaaatccttttaacaaaaaaaaaccccatttttttggtttgaaaaaccccaaaaaaaccccttttttcttttacaaactttttttcccaaaattggttaaccaccccttccctttttaaaaaggaaggggtcccttttccccagcccctcccgcgggaannnnnnnnnannnnnnnnnnnnnnannnnnnnnnnnnnnnnnnnnnnnnnnnnnnnnnnnnnnnnnnnnnnnnnnnnnnnnannnnnannnnannnnnnnnnananaaaaaaaaaaaaaaaanaaaaanaaaaanaaanaaaaaaaaaaaaanaaaaaaaaaaaaaaaaaaaaaaaaaa

SEQ ID NO: 61939 - DNA, 297 bp, Homo sapiens
actttttttttttttttttttttttttttttttaaaaaacccctttttttttaaaaatttttcccctttcccaaaaaaaaaaaccaggggggggaaaaatttttccccccccttccccccatttccccctttttttaaaccctagggggggggtttttccccaaaaaaaaaaccccttccccccctttttttaaaaaaaccccccccctttttcccccaattttttttgggggggcccaaatttgctttttggggtcccccccccaaaaacccccttggggcccccctttttttttt

SEQ ID NO: 61940 - DNA, 271 bp, Homo sapiens
acttttttttttttttttttttaagggcgtccctttcctaaaatttaccttgggaacccttgaaccttttaaaaaactttaaaggggttaccccttttggccaattggcctaatccaaaaaccaaaccttgggtccatgtttccaaggccaaaagaaaaaggggaaaaataaaaaacctaaaaagaaaggggaattccagggcctcccccttttaacctctaataaaaaatgaaccaaatttaattttgggggaaaacccccccagccaaa

SEQ ID NO: 61941 - DNA, 313 bp, Homo sapiens
acttttttttttttttttttttttttttgggggaagggggggaaaacccaaaaccctttttaaaaggggggcttttttaacccccaaaagggggaaaaaatttttaatttaaaccccccccccggcaaagcccccgggaaccccattaaattttaattggaaaaaagggccatttttaaaggtttttggaaaaaaaaaaaacccccccaaaaaaacccctttaaaccccccagaaaaaaaagggttttaaaaattttcccccccagagaacccccccaaaaaaaaaaaaaatcccttaaaaaacccaaaaaaa

SEQ ID NO: 61942 - DNA, 283 bp, Homo sapiens
acgcgggggctcacgcctgtaatcccagcacactgggaggccgaggcgggtgaatcacgaggtcaggagatcgagaccattctggctaacgcagtgaaaccccgtctctgctaaaaatacaaaaaaaaaaaaaaaaaaaaaaatttttttgggcccgggggggggccccttttccccccattttttgggggggtgggggaaaaaaaaaacttaaacccgggggggaaaattttgaaggaactaaaaatcccccctttgccttaaactgggggaaaaaaaaaaa

SEQ ID NO: 61943 - DNA, 397 bp, Homo sapiens
actttttttttttttttttttttttggggggggaaaaaaccccccaatttcccaaaaaaaaaaggggccccccgggggttttttttttttcccatttccccaaaaggggctccgaaaaatcaaacttttgaaaacccctttaaaaaaaaatttttttaaaacccaaaaaaaagggggggaaaaattccccttaaaaaaaaaaaatgggcccccccccaaaaaataaaaaaggggggaagcccttccttccttttccccggaaaaaaaaaaaaaaattccttttaaaaacattttttccccacagccctttcccctccaaaattaaacccttggggggttttgagggacccccccctcaaaaaaaaaaaccccttttcaaaaaaaaaaaaaatggggg

SEQ ID NO: 61944 - DNA, 467 bp, Homo sapiens
acagaggaagctctcagatagcagacttcagagacagcaggttgtaaagtgtttgttatcagatttaaaagaatgcctggctcttagttgattctctcctggatctggaaaggaaggaagaagaaaaaaggtgaaagtggattctctatagaatgtggatttttcccacaagagacttttgcagggaaatttcaaggtatggcttgggaggccaaagtgtgcagatcatgaggtcgggagattgagatcatcctggctaacacagtgaaacccccatctctactaaaaaaaaaaaaaaaaaaaaaaaaaaaaatttcccccccgggcggcccctttaaaaattggggaccccccgggccggggaaattttaatttaacctttttaaaccccccccccccgggggggggccccggccccccttttttttcccttttagggggggtaattgccccccgggggaaaaaag

SEQ ID NO: 61945 - DNA, 287 bp, Homo sapiens
acttttttttttttttttttttttaaaaaaaagggtttattttttttcccaaggtggaaggcaaggggtgaaaaaatattttttgaaacccccaacttcgggggtaaaagaattttccccccccaattttctttaaaataaaaaataaaggggccccacaaaatgcccaaaaaatttttttttttttttgggggggaggaatttaaccattttgcaaaagggggccttaaacttctggaccaaaaggattaccccccctgggcccccaaaaattgttgaaataaaaa

SEQ ID NO: 61946 - DNA, 313 bp, Homo sapiens
  misc_feature 58, 59, 60, 61, 62, 63, 64, 65, 66, 67, 68, 69, 70, 71, 72,73, 74, 75, 76, 77, 78, 79, 80, 81, 82, 83, 84, 85, 86,87, 88, 89, 90, 91, 92, 93, 94, 95, 96, 97, 98, 99, 100,101, 102, 103, 104, 105, 106, 107, 108, 109, 110, 111, 112: n = A,T,C or G
  misc_feature 113, 114, 115, 116, 117, 118, 119, 120, 121, 122, 123, 124,125, 126, 127, 128, 129, 130, 131, 132, 133, 134, 135, 136,137, 138, 139, 140: n = A,T,C or G
tccaccgcggtggcggcgcgagtacttttttttttctttttttttaacccctaacttnnnnnnnnnnnnnnnnnnnnnnnnnnnnnnnnnnnnnnnnnnnnnnnnnnnnnnnnnnnnnnnnnnnnnnnnnnnnnnnnnnntcactaaactttaatcatggaaaaaaatgtttcctgaatttaaaaaatttttaattttccccctttaaaaaaaaaaaaacccccccccaaaaaagggattttcccccggggtttcccctgggggaaccccaaaaaacccggggcctttccaaaaagcccaaaaaaattttggg

SEQ ID NO: 61947 - DNA, 138 bp, Homo sapiens
  misc_feature 4, 5, 6, 15: n = A,T,C or G
tgannncccccaatnaaggtaaaaataagaaggtttgcggttaggattcaataaagggatgggtttagggggcaaaatattatgctttgtggttgggatttttggaggatggggattattgctaggataaggatggat

SEQ ID NO: 61948 - DNA, 421 bp, Homo sapiens
acttttttttttttttttttttttgccaaaaattatttttaccccccccttaaaattttggggggggggggggccccccaaaatcccccccccggtttaaggggggtttttcattataaaaaacttttcccttaaaaacaaaggcttttaaaaactaaaaaatttttaatttccccccttgaaaaaaaaaaaaaaccccccaaaaaaaaaggatttttctttgggggttcccccagggggaccccaaaaaaactgggggatttccaaacccccgttccccgggcccttaaaaaaataaggaacccccccgcccgaaaaaatttaattaaaacttttttaaaccccgccaccctagggggggcccccgcccccaatttttttcccctttaaaaaaggtaaaatccccccttggcaaaaaaaa

SEQ ID NO: 61949 - DNA, 350 bp, Homo sapiens
  misc_feature 35: n = A,T,C or G
gtcaacatggtacatacctgttgtgcctagatggnagctccaccgcggtggcggccgcccgggcaggtacttgtattagtccattctcacactactataaagacactacccgagattgggtaattcataaaggaaagaggtttaattgagtcacagttctgcatggctgaggaggcctcatggaacttacaatcatggtgaaatgggaagcagtcatcttcttcacaagacaacaggagagagaaggattgtgtgtaggaggagctgtgaaacacttaacaaaaccatcagatctcctgagaactcactcactatcgtaagaacagtatggcggaaaccgcccacatgat

SEQ ID NO: 61950 - DNA, 293 bp, Homo sapiens
acttttttttttttttttttttttttcccttttaaaaccccatgaaaaattttttaaaaaaaaaaaaagggccccccgggcttgaggcccctgagggggggggggggttcccctaacttacaggctaaaaggggcctggggggatccccttccctaaaaaaaattcacccccccccccctttaaaaattttcccccccggggggcccttttaaaaattagggatccccccggcctcgaaaattttattttaaccttttttaaccccccccccctaggggggggccccgccccc

SEQ ID NO: 61951 - DNA, 243 bp, Homo sapiens
acattcacatgtaatcagaagtgtctttacgtttggaagaggagggaagaagaggaggtcatagtgccatgatatgagactcaacccaccattgttggctttgaatatggaacaaggggccacaaggaaaggaatacaggaggctgccagaagttggaaaagacaagaaaatgaattcttccctggagcctccagaaaggaatatagccctactaatacctttatgttggacttctgatctac

SEQ ID NO: 61952 - DNA, 295 bp, Homo sapiens
  misc_feature 9: n = A,T,C or G
acccacacnaggggaaaggtcagatgagaacacagtgagtagatggccacctgcaagccaggaatagaggctttagcagaaaataaggctggcacctagatcatggacttccagcctccagaactgtgagaaaataaatttctgtgtttaaactaccaagtctgtggcattatgttatggcaacccaagaagtatgataacaataatatatcatgttaatgtaataaaactggtcatattatattactggaattttgaaaaccactgctttagagaacggcctcaagataggcta

SEQ ID NO: 61953 - DNA, 175 bp, Homo sapiens
tccaccgcggtggcggccgattctactagcattattctgaatactgtcgccccatggtatctgtggggaactggttcctggaccttccaaggataccaaaatccatggatgctcaagtccccgatataaaatgacacagtatttgcatataacctacacacattatcccatatac

SEQ ID NO: 61954 - DNA, 301 bp, Homo sapiens
acttttttttttttttttttttttaagccccaaaagggggaaaggggggtcttttagggaaaaaccggcccctttttaaaaattttttggggaaattatttttagaacaaggggcaaaaaattgggttttcccccaaaattttaaaacctttgcccgttttttccccccggccttttacgggaaaaagggttttgtttaaaacccccggaaattcctttttttttaaacccaatgggggggcccctttataagtccaaaactttttggaataaaatttttaaaaaaaggggggtttaaatg

SEQ ID NO: 61955 - DNA, 285 bp, Homo sapiens
actttttttttttttttttttttttgggcccttttttaaaaaccaccaaaacccccccccttaaccattaacccccccactcgcttttaaaaaaggggttttttataaggggttttaactctggggtttttaaaaaagaaacccaaaaatttttttgggggttttaaaaaaaaaaaaaaggccctccttttttaaaaaaacctttttcggggggggggaaaacccaaatattttaaaaccccaagaaaaattttctttttccctatatccccccttttaaaaaaa

SEQ ID NO: 61956 - DNA, 273 bp, Homo sapiens
acttttttttttttttttttttttttgggcccccttttaaagctttttttttttttttaaaaatttaagcctttaaaaatcccgtaaaaaacttacccccaaaaaattttttaaaacccttggggttttttttttaaaggggggggttaaaccccccccctaaaaaaaaaaaaaacttttggggggggtcccaaaagccccccgcgccccccaaaaaaaacccccgggggggggggcccaagggcccaaaaaaaaggggggggggcccccccc

SEQ ID NO: 61957 - DNA, 308 bp, Homo sapiens
accaagactaacaatagctggtgagctaaaaaaatcatcaaaaaaatctcataatgttttaagaaagtttgtgaatttgtgttcggctgcattcaaagccatcctgggctgcatgtggcatgcaggttgtgggttggacaagtttggtctagactatcagttactgtgggaatggaaaggaggggtgaagttggaaggtctttaagagttagactgttacccccatgagggcaggaaccgtgtgtgttctattcagctttgacccataaagctctctactcctctgctccaagtgacaaggccccttt

SEQ ID NO: 61958 - DNA, 310 bp, Homo sapiens
acttttttttttttttttttttttttttttttttaaacgggtttcaccaaaaacaaaaggggaaacccccttttttaaaaaaagggggaaaaagggggcccccaaaatttttttttttttaccaaaaaccccattcaaaaaaaggccttaaaaaaaaaaaaaactttttttttcccttaaaaaacctaaatccccccccccagggtccccacccaataaaatttcccaaaggggttgggccggggccccttaaatttttttttgggggaaataaaattttttttttttttttaaaaaaaaaatttttttt

SEQ ID NO: 61959 - DNA, 477 bp, Homo sapiens
acttttttttttttttttttttccccccccaaaaagggttttaccccccctttttaaaaaaattttttaaaaaaccctttttagggaattttatttatggtttttttcggggggcccttaaaaaaaaaccttcctaacttttgaaattttgaaccaaatttttcccactttttgggggctcccctttttttttttttaaaaaggattttttgaaaaatcccccccccccggggaaaaaaaaaacctttttttggaaaaatccttttggcccaaaaaaaaagggttttttttttccccccccctttttccccttttttgccccccccaaaaaccttaccccctaaggggggggggtttttttaatttttttcccccactttttggaaaaaaaaaaaaaaaccaatgggggcccccctgggggtggggaaattccccttttttttaaaaaagttttttaaaagggaacccaattttttt

SEQ ID NO: 61960 - DNA, 143 bp, Homo sapiens
acttttttttttttttttttttttaaggaaggggaatttcccagggtttccgggccggaatttaaagggctttcccaaaaggggacccccccattttatggttcccacccccaaaattaaaggaatcccccaccctaaccctt

SEQ ID NO: 61961 - DNA, 317 bp, Homo sapiens
actttttttttttttttttttttttttttttaagggggaaaaatttgccccaaaaaaattgggggggggaaaaaaaccacacccccttttttttaaaaaatgggaaccaaaattcccccccttgggacacccctttttgggcccttttaaaggggaaattcccttgggggggggggccctttttttcccttttggggggggaaacttttctttttggggaaaaaaaaaggagggaaaaacccccccctctttaggagggaaaaaaccggggggcccctaaaaaaaaaggaaaaacccttgtttttaaaaaaaaaaaa

SEQ ID NO: 61962 - DNA, 308 bp, Homo sapiens
acctgaacatactcagtaacttgtaacaattataagtctttaaacaacctttctgccttataatgctttgggaatcaatttcaggatgatttttaggggaaaaaggaaattctaatttgtggcagaaccaactttggcatacctgggggaaatggtggtatagtaataatttgaaacatttttgagcattggtcactgtataattaaaaacaaaccgctgttgctgaaactattttgtctgttagtaaagtgactgattttagatagcatttcattagttctaagtgttcttttaaaaaagcctgctt

SEQ ID NO: 61963 - DNA, 316 bp, Homo sapiens
acctcctagtgtttgtagacaccttctctggctgggtagaggcattcccgaccaagcgggaaactgccaaggtcgtgtccaaaaagctgttagaagacatttttccgagatttggaatgccgcaggtattgggatctgataacgggcctgccttcgcctcccaggtaagtcagtcagtggccgatttactggggatcgattggaagttacattgtgcttatagaccccagagttcaggacaggtagaaagaatgaatagaacaattaaggagactttgaccaaattaacgcttgcatctggcactagagactgggt

SEQ ID NO: 61964 - DNA, 390 bp, Homo sapiens
  misc_feature 44, 303: n = A,T,C or G
gggataccgtcgttcatggtatatcagttgttgtgctgattggnagctccaccgcggtggcagcggccgcccgggcaggtacttctagctgctgtgtgggaaatagattcttaaagttagttgcaatattccatgtgagaaatggtggtagcttggactgcagaggaagcaatggagatggagaaatgcaaatgcacttggggtgtgttctgaaggtagaattgaaaggatttgcacataggctggatgtgtggactgaggaaaaaaaggatgaatgcaagtaagttcttaggtttttgatangagcacctggttggctgatgggtgcattttcagagatggagaaaggctgggaagaagccaagtggtttttttttttttttttttttt

SEQ ID NO: 61965 - DNA, 164 bp, Homo sapiens
acttttttttttttttttttttttttaaaaaatttttattttaaaggggaaatttgttggaatccccctgttagcccccatatttttgggaaaaattgggttgtttttttttttcccccccccccttttttttttccccttttaaattttgggaaatttttttt

SEQ ID NO: 61966 - DNA, 152 bp, Homo sapiens
tccaccgcggtggcagcggccgcccgggcaggtactttttttttttttttttttttgggctttaaaacccaaccaaataattttgggccccatttatttctaaaaaatttttgggggaaacccaaaaagcccttttttttgtaaaaccccaa

SEQ ID NO: 61967 - DNA, 287 bp, Homo sapiens
tccaccgcggtggcggccgccgcggccaggtacaaaaatgttgccacctcataagccaaggaaactagatggctgtaccttctccaacatcacatccccgtatgttatcttctcatggaggtccagttgtccgacctcctactgggtgaaatccacatacaaatatttgaatgacactgccccctgtgtggcaacatgatcagaatagggagatatggaagagggatagggggataacatggtacaaagctgactggcgaaattaaccatgaacatagcttacctta

SEQ ID NO: 61968 - DNA, 300 bp, Homo sapiens
acttttttttttttttttttttgggcccccccgtttttgggttttccattttcccattaaaaatttttttttttcaaaaaggggtttcccccccccccccaaaaaaatttttcttttttggggggggttaaaaaaaggggtaaacggggtttaaaaagacccattttccccggggggggggtttaagggggttttaaaacccccgggggaaaattttttttaaaaaaacccccttaaaattttttaaaccccccccccttttaaaaaaaaattttaggggggtaaaaccccctttttttt

SEQ ID NO: 61969 - DNA, 234 bp, Homo sapiens
tccaccgcggtggcagcggccgccgggcaggtacttatcggtctttttttcaggaattggaagttaaataacccaacttacacatggttttaaaaacaaaatattggaggctgggcatggtggctcatgcctcttaatcctagcacttggagagaccaggacaggaggattgcttgaagccacgagtttgagattagcctatgcaacagaactagactttgccctctaaaaaaa

SEQ ID NO: 61970 - DNA, 279 bp, Homo sapiens
actctagtttagtttttttttttttttttttaagggcgtacctttcctaaaatttactttgggaacccttgtaccttttaaaaaactttaaaggggttgccagttttggccaatttgcctattccaaaaacctaaccttgggtccatgtttccaaggcctaaagaaaaaaggggaaaataaaaaacctaaaaatgaaaggggattccatggccttccccttttaagtttttaaaaaaaatggaccaaatttgatttttggggaaaaccccctcagccaa

SEQ ID NO: 61971 - DNA, 560 bp, Homo sapiens
ggctcaagatggactttttatactgcaagctgtggttttgtgggtcatgttttaggaaggcagcaatgtatttggtgcagaggaccgcaacccttgaaatatgtgctttggcattttaagcagacatatttgttaaattactgcttgaccacgaatgttgtcattgagtcacccccagctttttggggtctatttcttactgctctcttctctgcttgggcagctgtaacaatgtaggaatgttgaatgtctagctgctactatctctcagactcttatcctgcccacagttctgtatgcctcttaggcctggcacaacatcatggtgttgcttatgcctcattagacctgctgcttaagggaattaaatgataccctaatggtctaaaaagggtaatgtatttccgagcatgtcatatttactgtaggaggttggggaaggcgtcacaggcactgtaagtggtagtaattacctatccgtatagatatttgtgtaattttgttgtgttgagacaatgcataatggtaagtttgagagcttttcagtcatattggtgaag

SEQ ID NO: 61972 - DNA, 352 bp, Homo sapiens
cacgcgtccggtgctgtggcgcggggagaccgccgtgcctggcgcgcccgaggccctgcgggccgctgcgagcccgcggcaagcgcctgggcttcatcaccaacaacagcagcaagacccgcgctgcctacgccgagaagctgcggcgcctgggcttcggcggccccgcggggcccggcgccagcctggaggtcttcggcacggcctactgcaccgcgctctacctgcgccagcgcctggccggcgcccccgcgcccaaggcctacgtgctgggcagcccagccctggccgcggagctggaggccgtgggcgtcgccagcgtgggcgtggggcccgagccactgcagggcga

SEQ ID NO: 61973 - DNA, 303 bp, Homo sapiens
cgaaattgtttgagccttgattcgatcatgaaaccagcttacccttcccctgtgtgctggccccagttttctaaccaggtgttgaatgaactggatggactctgccagatccctccgtgcaaggctggaatcagtccattgttcaactgtgccctttggggctgtggttcatttggctctgatttttcctatatgttctctcctccaacccccatagctccatcttgtctacaagattttgttagaagccgtcaaaatcctgctgactcgagatgcgctgtggtgcatgttttccccgggcac

SEQ ID NO: 61974 - DNA, 466 bp, Homo sapiens
tccgcggattctcgctgtttgaggccagccagatcagcaaggagatctgtgaggcccacgacatcctcatgtgtcccctcggcgaccacagccgcaggtaccagcggctctcggaaacctgcacttttgccaagctcacccacctctttgacaatgatggcacggtggtgttcgccatcttcatggctctctgggccacggtgttcctggagatctggaagcggcagcgcgcccgcgtggtcctgcactgggacctgtacgtgtgggacgaggaacaggaggaaatggcacttcagctcattaactgccccgactacaagctccggccataccagcactcctacctacgcagcaccgtcatcctcgtcctgaccctgctcatgatctgcctcatgatcggcatggcccacgtcctggtggtctaccgcgttctggcctccgcgctcttcagcagctcggccgtgcc

SEQ ID NO: 61975 - DNA, 412 bp, Homo sapiens
gtccgctcatgcggattgcattgtgaacgtactgacatagaaaacacgtagaagagggcgtggcacatacaagtgctatttcagtgttagctatggagctttcttttcttcttttttaggacttttgtaattattaaaatttttgagcatcttttacagtgggtcaaatatcttattttgtgatgtcagcagtataccccctgagcagcggcatgccatatccagcgctggagccctttcccaggctgatcccgaggccctttcaaccagggacgtgtagctccagtgtgacaaactcctttcctaggggcttctttcaccagaccacttgtcggtgcgttcaagaaaagggtaaagaactatgggatgattggttcgagacagaataggaaggaaggctgcttgagaagga

SEQ ID NO: 61976 - DNA, 536 bp, Homo sapiens
ccacgcgtccgcccacgcgtccggtcccagacgggcttttcccagaagctaaaagagaagggccagagaatgtcgtcccagccagcagggaaccagacctcccccggggccacagaggactactcctatggcagcgtggtacactcgatgtagccccaggggtggcgaggagctccagccagagggggaagtcctcctgccacaccagcataccacccggcctgtaccacgcctgcctggcctcgctgtcaatccttgtgctgctgctcctggccatgctggtgaggcgccgccagctctggcctgactgtgtgcgtggcaggcccggcctgcccagccctgtggatttcttggctggggacaggccccgggcagtgcctgctgctgttttcatggtcctcctgagctccctgtgtttgctgctccccgacgaggacgcattgcccttcctgactctcgcctgagcacccagccaagatgggaaaactgaagctccaagaggggcctggaagatactgggactgttctattatgct

SEQ ID NO: 61977 - DNA, 429 bp, Homo sapiens
acgcggggcttgcatctctggggccaaggagtggtgggtgagatcttccatggccctggcatgggtgatataagcgggaccggtaaggtggtggagctcttaccagaccctgcagaaccctctccgtggtgttgaacttcctggaaccagggtgttgcatgttttcctcataatgcaggttggtgatggtgaagttgagggtgaacggcaccaggagagggccagcagttgtggggctggggagggaggatggagtccctgacccaaggtccactgtggaggtcccaggagctgaaaaaagtcctcatcagtgaaagcagaaagcactctcatggcagaaacggcaagaagatagactattatgaggtctgctgcatgtgggcttgagctgggtctgtctttggagctggggcagaggggagcttgagt

SEQ ID NO: 61978 - DNA, 509 bp, Homo sapiens
cccgcccccggggtaagaaaagaatgctgtgtttgcaagcaagtctttatgtttgatgttaggaagttaagaaaattattaataaattgtctttgcttggagaaataggaggcaagattatcttctaattgggaaaatgcagcagaaggcattggcaataatgagactggaggtttaacaacagtggagaagtttcgaaatagctgctgtggcaaacaagagaggtgactagggaatattgaagaaatgccagggctcacatgaggctagagatcaagaaatcactgtagtactaatctacacagttgtggatgtttgtccagcagcattgagcagactgaataaatttaaattaatgtaggcttgaagcttcatcgggttatttttgctttgtattgtgttgctttgtgtttgatagcagtacaacaaggcagtatggttaagaacattggcaaggcaatggttgaagtgacaaagcataaaatctaaactgaacatgaatggcaatg

SEQ ID NO: 61979 - DNA, 360 bp, Homo sapiens
  misc_feature 6, 15: n = A,T,C or G
cgcccncgttttttnaaaagaaaatagatgaaaaaaactccaagatgaccactttcgatgttgtatgtcaatcctgaattctcgtagctggtgagagaggcacaagagatgctaaaggagaatgcaggatccagcagcgttgatggcgacagcagctcagccgcacgttgtcgagcactggatagttgattaaaagcgtttccatcactcattcagcaagcactggccaagccacctgtcatgtgctaggcatatctgtgacctcatttacctgctcactgtggctgttacaataaaggtgtggaaagcgagaggcagagctgttggtcttctcgagtccaggacttgagccctgatctt

SEQ ID NO: 61980 - DNA, 379 bp, Homo sapiens
  misc_feature 14, 16, 20, 21: n = A,T,C or G
acgactcactattntngggnnaattggagctccaccgcggtggcggccgttaaacatgtgtcactgggcaggcggtgcctctaatactggtgatgctagaggtgatgtttttggtaaacaggcggggtaagatttgccgagttccttttactttttttaacctttccttatgagcatgcctgtgttgggttgacagtgagggtaataatgacttgttggttgattgtagatattgggctgttaattgtcagttcagtgttttgatctgacgcaggcttatgcggaggagaatgttttcatgttacttatactaacattagttcttctatagggtgatagattggtccaattgggtgtgaggagttcagttatatgtttg

SEQ ID NO: 61981 - DNA, 487 bp, Homo sapiens
tccaggacacctgacatgttcccactgcagaaaccacacgggtttctccagcaccactgagacttgctcagcctgtgtagagtagcctggacatactggggctttattttcctgaggacaaccctcaaccaatgagtgccaggaatcagtgagtaactgcccacctgttttcccccctcaccggataattctgaagcatcttttacccagctctgcagaggatccctgcaggactgagcctggtgcccgcagtgatcatctgcacttcaatgcacctttccttggctttccgccctgcgccgtttctcacttctccactacttggagtcctttccaaagaaactatccatacctgaaatctacttttacgtaaacccaagctaagacggtggaatattgcttcattttgaagtcagtgggagcaattaaaagcttaaacaggggcttggatgtatgtggattggcagctgaggaccccaggggtggg

SEQ ID NO: 61982 - DNA, 319 bp, Homo sapiens
  misc_feature 180, 188, 249, 272, 273, 275, 283, 284, 289, 291, 301: n = A,T,C or G
cgctacttagggcgaattggagctccccgcggtggcggccgaggtacagcctggaccacccctggtgtgtagctagtaagattaccctgagctgcagctgagcctgagccaatgggacagttacacttgacagacaaagatggtggagattggcataccattgaaactaaagagctcttnaagtcaanggaagctgggctgggcagtatccccggctttagttcttcactggggagggattcttgaccnagcacaaaaacttaacaaaagtnntntaaaaatnnaaagncnaattaaaatnttaaaaaaaaaaaaaaaa

SEQ ID NO: 61983 - DNA, 431 bp, Homo sapiens
  misc_feature 227, 234, 238, 243, 245, 247, 250, 257, 259, 262, 268, 269,273, 275, 279, 283, 287, 303, 304, 324, 329, 334, 338, 358,362, 363, 364, 366, 369, 370, 371, 372, 374, 376, 377, 378,379, 381, 383, 384, 387, 388, 389, 398, 408, 412, 425: n = A,T,C or G
gacccccgcgtccgcaaggacacacatgcgctggagcaggcactggactttgtgcgtgcctcactcagccgtggtgctgatggctcacgccacatctgccccgacggctcttatgcgacccatggtgatgctcccactgccatcactggtgttattggcggttcctacagtgatgtctccatccaggtggccaacctcttgaggctatttcagatcccacagattanctacgcntttnccagncncnaanttgagananaangccctnntttnanttantttncccnaaaagtgccttcttgnntttttttaaagccaaccccnatggnccttnaatnattttttttcaaaaaaaaantaannntnttnnnntntnnnntnannaannnaaaaaaggncgggcccgtntaanacttagttttaanaaaaaa

SEQ ID NO: 61984 - DNA, 225 bp, Homo sapiens
ttggagctcaccgcggtggcggccgaggtcgcccggccagccttcaagatgggtttgtcaattcggccacctccagccaccacaccaaccacagctctgttggctgaggagataaccttcttggagccggagggcagcttcacacagggtcttcttggtctcagggttgtgggagataacaggtggcatagttccctgatgcccgggcccccgcgtacctgcccg

SEQ ID NO: 61985 - DNA, 519 bp, Homo sapiens
cgtccgtgtgattgcagttggcaataggaaaaaatggaaaaaggtgtttcataagtagaagatatctgcagtgatttggagtaattgatttccatttccatttttgttttatgtactaattattttataatttagcattttaatcctaatttagaattctagtgcagagatgatcagagacatatttcacccaaattagtgttgaataaatgataagactgaaattcggaagcaataaagtatatttcatgttttcctttctgaatttatagtaatatcagcataaaaaatgaagaaccacagaatggctgcagatgttccttgtcttttccatgactgacatttttcatgtgagtgtattatgtatgtaggagctctgggcagttctttcttaactatgtagcaattgcagagcacagtttcaaagcataaagaagaaacaaattgggaagaatggcacaagaagacaagttgaaattagatgccagaactgcagattacttggttgaaatgtctttg

SEQ ID NO: 61986 - DNA, 423 bp, Homo sapiens
  misc_feature 393, 398, 401, 413, 414: n = A,T,C or G
agctccccgcggtggcggccgcccgggcaggtacaaagatatttatgatacatgtatgacttgtctaagttattaacattttctctagccttaggtaatgcatgaaagcacatgtttcagtgccactcacataagaagtgcccggtaagtgttagctattattgtctacttgagttactactttctaaaagtatgttgaagtctttttctgtaattgcagatttgttgattttgcatttgagtattttctatattttgaagctgttagatgcatagtcatgatttttggtggaatgttttatcaatttttgaaaattgcctttgtctcatataatgcttttcatattgaactatattttgtctgctattaaatacttccaagcctcaaaaaanaaaanaantaaaaaaaaaanngcttgacct

SEQ ID NO: 61987 - DNA, 364 bp, Homo sapiens
  misc_feature 5, 18, 25, 42, 56, 82, 85, 92, 99, 102, 114, 122, 139, 143,164, 184, 191, 192, 212, 217, 262, 269, 286, 299, 307, 308,332: n = A,T,C or G
tactnaaggggaacaaangctgggnaccgggccccccctcgnggtcgacggtatcnataagcttgatatcgaattcctgcanccnggggganccactanttntagaggggccgnggtaccgnacgggaaagatgaaaanttanatccaagcggtaatatagcanggactaacccctataccttntgcatanngaataaactagaaataactntgcanggagagccaaagctaagacccccgaaaccagacgagttacctaanaacagcnaaaagagcacacccgtntatgtagcaaaanattgggannatttataggttgaggggacaaacntaccgagcctggtgatagctggttgtccaaga

SEQ ID NO: 61988 - DNA, 380 bp, Homo sapiens
  misc_feature 45, 78, 259, 345, 355: n = A,T,C or G
ctctggccctttctcatctacagcatttgctcatattttcccctncaactgggaggaacccctccccaacttcttttnttccaagcttaatgatttctcataaacttttctctgagcccctaggaaaaaaactgtgttttctttgctgccccccaaccatagtagtcaactttaaaattggcattaacacattcccccttgtcttacacatatacatttctttacactcctatttgatgacaggtccatccaggaaagnaatcatatcttctatgccttattccctagagtaacttgtgtattacaggtgttcaatgatgggtaatgattaagtgaaaagatcanggcatgaggnatgtgtgcaaaaggctgggggctgt

SEQ ID NO: 61989 - DNA, 411 bp, Homo sapiens
  misc_feature 4, 19: n = A,T,C or G
gtcncccacgcgtccggcngccaagccttttgcccacctgagccacggagacagccctgtgtccacctccacccctctcccggagaagaccctggcttccttcagcacccagtggagcctggatcggagccgtaccccccggggactagatgatgaactggacaccggggatgccaagttcttccaggtcattgagcagctcaactcgcagaaacagtggaagcagtcgaaggacttcaacccactgacactgtacttcagagagaaggagatggagaaagagtaccgactctctgcaatccccgccttcaaatactatgaagcctgcaccttcctggtttttctctccaacttcatcatccagatgctagtgacaaacaggcccccagctctggccatcacgtatagcat

SEQ ID NO: 61990 - DNA, 501 bp, Homo sapiens
agtacttgtacatatctctgtgatggtgttcatctcacgatgtttgattccattttgatgggtttgttgatagcatgattcctgctgtcactatgatttgtgtttattatagctgtttcctttttaataaaggatgctgttgcatataaacactgacatgaagctatcttttcagaaattgcattctgtatgctgatatagtcattgcaatgttgtaaagtgagtattttgctaccaacagagttggattatatattttaatatatcgattagtgtattttgttgtttcaatataagaaaggacctatagttatatttattttgcatttgttcttaggtagtatacacactttcaaggagagatagcacagtaggcaatacaatgtggctgaagcacaccttgatagaagaacaaataaaggactgggcagaggtgaaaatgattatgtaggaagtaggaagaaagtcagattcaccatagtcgaagagtcatggcaggag

SEQ ID NO: 61991 - DNA, 531 bp, Homo sapiens
cgtccggggaagacatggaagatctggttcatgacccagaatttgatcgtggaaaagcaagatgcataatatctgatggtatggatgcaggcctttggcaactttgtactactagggacataatggactctgtagtcagagttatggccatggccatagactatagacggcaggcctggcttcgacttacatctctcactaagaaaacccaggagaagatctcccacttgccctttgatggtacttccctttttggacaagatgtgaaagctgttgttgcagaagacaacaatataaaagaaaatgactataaagatcacaaatactataatcagcatcgatacttttatagtcatgatcagaaagcacattatcacaatagaggatactccaaaggggattggtacaaacctcgaaaccacccctatagatatagaaagaagggagactcttcagaacgcatgggtacaagaattaataacctggttaatgttcagcagagtagtcattcaagatcctaactattttact

SEQ ID NO: 61992 - DNA, 380 bp, Homo sapiens
  misc_feature 251, 298: n = A,T,C or G
gctccccgcggtggcggccgaggtactcgtaggttcagtatcattggtggccaattgatttgatggtaagggagggatcgttgacctcgtctgttatgtaaaggatgccgtagggatgggagggcgatgaggactaggatgatggcgggcaggatagttcagacggtttctatttcctgagccgtctgagatgtttagtattaagttagtttttgttgtgagtgttaggaaaaagggcatacagggactanggaagcagaataaggaaaatgattatgagggccgtgatcatgaaaanggtgataagctcttctatgataggggaagtaccgtcttgtagaccctacttgcgctgcatgtgccatcccgcgtcctgcccg

SEQ ID NO: 61993 - DNA, 415 bp, Homo sapiens
cgtcccgcaggtgtggccaacacagccggggccttggcaggtgaggggcgggcctctgtgcccaggagttcccctgtctgtggggtttgaggccaccgaggtgctgcagggtggggttgtgcctcccttcagagggggtccgggtgtcagaggagggcacagaccccagagcaggcccaggagaggaggatggggctgccttccaggttccactggactttgctgacggcaggtggctcatgagtcgccatctgccctgactcacagatatgttcccatcctggtagcccagggtccccgggataccgcctggccccgctgagtgccatggatgatgggggtccttcttcagctcagcctcgcctgggccggcctgtggctcccattttcctttcagcgggacaaaggggacttg

SEQ ID NO: 61994 - DNA, 501 bp, Homo sapiens
  misc_feature 490: n = A,T,C or G
agaaccgagaatcagctgtatggaaatgcacacaggtggcagatataaatagcagcagatacacgaatcagtgcgggtccatcatataactcctagctttagtctctaaacttaggctcccactcaactcaactcctactctaactcaagatataccataccttggtttgctctttctctaagcatcgctgttctagtcttctaaggagcaggaatataaatctacatctatgtgaaactacagcacccccaagggaaaataaagaatccagtgctattctagtaattttagggcagtagtacagtacaatgcaaagtataggcttttgaactaaattggcctgggttcaaatatgagccctctcacattctattaggttgaaccatataaaaatggagatattcaatcatttttttacagtttcacgtagttcatctctgtattctagtggtaaatcattttaacctaagtttcatttccttctgttgntagttttttta

SEQ ID NO: 61995 - DNA, 515 bp, Homo sapiens
atggctcgaattaaaaatatataagtaaaaagtcttaacttttctccctatcacctagccagccagttcccctctctggactcaaatttgtgttactagttctagtgtatccttccaagatactttatctggtacaagcagaatacattttcttttccctgccttcttttacacaaatgatttacacattattttctacttttttcatttaatatcctaatgagatcattacataacagtatataaagaatctcttcatctttttttttttttggatgtgaaaaataccatgtgtggattagtcagagtttactggtacagatagtaaaatgtccagaagacatttcatccacatggcagatatttgtattatatgataattttctgtagctgcaatcggtggaccacaaaatgtctttataatttcattagctgttgccaaattgccctccatagagatcatatacatttacattcccactggcagtgtatgaatactaggttctccataccta

SEQ ID NO: 61996 - DNA, 197 bp, Homo sapiens
  misc_feature 6, 31, 41, 54, 55, 58, 59, 70, 73, 78, 115, 125, 148, 177,181, 186, 190: n = A,T,C or G
aaagantttctattatgcaaagtgttttagnactgacctgntatatatgaaagnnagnnctaaaacactntgnataantattacccttaacttacacaataatctaatcaggcangtatactatnattttaagcccatcttacacatncaggaacataggaacgaagattacatganctgncactnaagnggcctac

SEQ ID NO: 61997 - DNA, 291 bp, Homo sapiens
  misc_feature 33, 36, 54, 60, 64, 74, 82, 96, 98, 107, 127, 135, 147, 158,172: n = A,T,C or G
tctgcgtggcactatattatctttcatgtatgngtncatttatttatacgcatnaccttncctnatagaatgtnctatagtnccaggaaacatagncnggcctgtcntgctcacagctgcctcactntagcccanaaaacagcctgncactcaagttntaggcactcaaganttatcttgtaagcaaatgactcttgagctcttattacacatgaattgttgctatgggcaccagagccccttccctgagaaggaaaaccacttgcctgaggtctcaagactcacacattg

SEQ ID NO: 61998 - DNA, 463 bp, Homo sapiens
  misc_feature 155, 175, 199, 210, 241, 426, 452: n = A,T,C or G
ctatagggcgaattggagctccccgcggtggcggccgcccgggcaggtacaaagaccaattccttcctaacctggattccactgtccttggtgaaaactactttgatggaacctaccagatgctttatcttttggttaaaggaactatacctgtngaaattcacactgccacagngatatttgtttctttccaattatntgttgcaacanaagatgacttttatacctctcacaatctggntaaaaatcttgccttgttcctaaagataccaagtgacaaaatccgtatcagcaaaataagagggaagagtctgaggaggaagagatccatgggattcataattgaaatagagattggagaccctcctattcagttcataagcaatggcaccacaggtcagatgcagttatctgaactccaggaanttgctggttctcttggacaagctgtnattttaggaaa

SEQ ID NO: 61999 - DNA, 400 bp, Homo sapiens
  misc_feature 29, 84, 108, 132, 158, 164, 184, 188, 192, 200, 202, 215,217, 219, 232, 237, 270, 274, 345: n = A,T,C or G
cctcactttgtccctctcttggtttctgncgatacccctgactacgatgaatcaagtttaccaaggttgactgggtcctgtcanacccaggggatgcccctgagcttncctccttacccctgggaaggtcanggatgcatggatctccacgctacacngatctncaggctatgcctcctccatnggantgtncttgggtncntgtcctggggagngnanggagggaatcagnttctnactctggcctgctcggggtgcctgacccagatnctgnccctgcctgccccaaaggctaggtcttctgcgacctttcttgggtgcaaggggagtggggccggtgggaangatggaccacatttttcatctccatgctgagggacagggtctgggtagactgaaa

SEQ ID NO: 62000 - DNA, 391 bp, Homo sapiens
tcactatagttcgaattaggagccccaccgcggtggcggccgatgtacttttttttttttttttttgctttttaattggatgcctggagacaattccatttcaattaccttattggcatgacgagatatacaagggctgccaatgtcaatacattaagactgagcgtgctggagcagcagccagggttcagggcactgctgtgtcatctgcgccacggtgcacaaaggcagcttcaaaagcatttcagcatgatcgcttccctctctccgctcctggggagagaaggatcctgcacaccacaggcaaatcatgctgaaattgaggtggtgcctttgggactcccatcccatcacagtcttgggattctttagctgagatctactagagcct

SEQ ID NO: 62001 - DNA, 370 bp, Homo sapiens
cgaccacgcgtccgcactctaaccagacctttctgcttattctgtgaaataacacaacttgggcccattcagctctttgcaggttatcagactcttgctctatcggatcccatgtaaagaatttctaaggattattttctatagaaatgggttcttcaccccactgttttactccacctacagtactactcaaatgtgaacagaataggaatagaaaatgaaagcaataaaatatgttcaaagagcattttaaaaatgtaaatccattttaggaaaatgtctgaacctgagataaaagatgaaagcaatttagatcattattttattggttggcacagggctagcctgcaccaaccctttaccaaaaggg

SEQ ID NO: 62002 - DNA, 659 bp, Homo sapiens
  misc_feature 29, 31, 51, 105, 111, 281, 341, 367, 502: n = A,T,C or G
ccacgcgtccggcacatttcacctgattngngtcgacgctttcctccccgntcagaagtgacgagactgtatggatcggtttgtgatttaaggacgaacaaactncccggntcccctgggctaagcaaatctatgtttgatcttacaaactcatctcagcgattcatccagagacatgattcattgtccagtgtacccagtagttcttcttcaaggaaaaattctcaggggagtaacagaagcctggatacaattactctatcaggagatgaaagggactntgggagactgaatgtgaaattgttttataattcttcagtagaacagatctggatcacagntttaccagggcaagagatttaagttnggccctctagttatgggaggacactcctactgtttctataaaaggaatacttacattgcccaaaccagtgcatttcaaatcttcagccaaggaaggttccaacgctattgaatttatgggaaaccgtttgtattngctattaaacttcaaaatctacaaactgtaagacttgtatttaagattcaaacccagactcccaggaagaaaaccattggagaatgctcaatggcactcagaacccttgcacacaggaaaaggaatactctttggatataacaccaccttcaaaaaa

SEQ ID NO: 62003 - DNA, 416 bp, Homo sapiens
  misc_feature 5, 101, 186, 208, 210, 211, 218, 219, 226, 235, 239, 259,280, 291, 298, 301, 305, 306, 308, 320, 321, 327, 333, 334,336, 352, 358, 359, 367, 368, 379, 388, 389, 391, 403, 408: n = A,T,C or G
cgccncgcgtccgggatagagcaggcacctgggttctgggaggcctggtactgtttctcaggccacccaaggcagagccacacatttgccagccctcctgnacagtgcccatcccagagactgatcagggaggaaaggacagcgccaacagcagctgccacagacgggctttgtcagaaactaatntttaaagaccaaaaggagtgancnnttttagnntgttttntttcttganaaanaaaattccaccccggtcccnttttttttttaaaaggggggnaaaaaaaaaanggggccnttnaaanncnctctaaaaaaanntgggancttttnntnggggccttttaaaaanccccannaaaggggnnctttttttttnaaaaaaaanntnttttttttgggnggaanaaaaaaaa

SEQ ID NO: 62004 - DNA, 333 bp, Homo sapiens
  misc_feature 48, 107, 112, 149, 165, 198, 210, 226, 241, 279, 312, 331,333: n = A,T,C or G
agggcgaattggagctccccgcggtggcggcccgaggtacaagctttnttttttttttttttttttttttttctttttctacacatgcttttttattagtatagatnccttnacagacaatactgtaatttttagaggagttccacatnattacatcaacagtgngaatttctaacagaggcaaaactgagcaccatngtttacaagtangaaagaccatgcttgnggacaacagaagttnactaaggatgcacgattgatctgagaagtttttaagcntccgtcctcgccctcctcctccttgaactcccnttgttcgtcggcccgtttnan

SEQ ID NO: 62005 - DNA, 493 bp, Homo sapiens
gcgtccgcttcaggtgcccttataaggcttccatgatgcagtcacctaagactggggtgtcttagtagcaaggatgacaatgtgatgtgtatttttgttaacctctgtgtgtatggcttgaattgatgctttgtgtgtggccagaggggagaggtggtggtatcctggcacgatcgtgaaatggataggataatgtttttaaacttagtgggagagagaaatgaaaaccaaccagaatataaggccatctaaagtgctaaatagactcaagcaggttctatggaggaggaagaagtgattaattctgatggggaggctggggaagcaggtgtctaaggaaaggttaccaagaaggtggcaattgaacttggccttgaaggatttagggggtagaatgctagggaaaatattccagggtgagaaaatgagtgagaagaggtgcaaaagaggaccactccagagaaacagtgggtaataagatttgactggaggg

SEQ ID NO: 62006 - DNA, 435 bp, Homo sapiens
cgcgtccgctaattttagaaaaacgactcttcagaacagatgacacatagaaatgtgagtttatgtaaacatgtaaatttgagtagcattagtttgttttctgtttaggaactgtatcagggtgacaaagatgaaagaatgctgccagaaaagtatattgttaaattttcaggcctccattggtgaagtttcaagtaacctttcacttaagttacttgtgtcagaggatggatgatggggtcatttaaattgttggacaaagccatgaaaggacttttaaaattttgtcataaaaatagccaatgatgtttttaattttacatctaaaactaatttgcattatcctgtggttagtgactgaatctcaactcagtcctcattttttagttcaacttttgacaaccttatattcattgacaccatggacagcacagt

SEQ ID NO: 62007 - DNA, 328 bp, Homo sapiens
  misc_feature 5, 246, 310, 325: n = A,T,C or G
aaacngttctagggggttgaactacatagtaaaaaaaataaaataaatagtacttagtgtaaaataattttataaatgatcttttgtactttaggacattaaattgtacaacttttgtatatataaaagcttaggaactttctgtttagcaggaaggcaacacattcctacacttttaatgtatatgtttgttataatgtccatgtaaacatgccctatgtttgtgccttttaattagtttgtctnaataaacaaaatgtagagaaaaatatgtagctatgactttgttacaactgttcttatccacagnacaaaaatggtttgnttt

SEQ ID NO: 62008 - DNA, 321 bp, Homo sapiens
ccacgcgtccgattttagggaaactttagttccacagtatttccaaaagtaatttccagtttagctcttaagactcttcagtgaactggcagccttttaataagaatgtactgtattagaaagtacaggctttaattttctaagtcctttaacatgagtaaagggcacgtgtctttctgacatctatttgtgccgttttccacttgtcattttaaagaattgggaccttcagatgtcacaactaaatgcaagtttctaaggcttttccttctaaattgctcattcttccctcttttcctggtacactgcaagcacttactc

SEQ ID NO: 62009 - DNA, 212 bp, Homo sapiens
acccacgcgtccgcttacgtttgttgtttttcagtaatgtgattttcttttaagttgggggttatgcagggttgtcattttgttataaccatctaatttctgcctgtgctgctttaatgctaaatgagatatcaacagctgacttcatatctcacctgtgagctccctgctgagttttggagggtctgctcatgggaagaaataggaaagag

SEQ ID NO: 62010 - DNA, 455 bp, Homo sapiens
  misc_feature 50, 65, 84, 86, 135, 158, 290, 299, 310, 318, 379, 398, 414: n = A,T,C or G
tcgccccgcgtccggccatcccgcagtatgcaaggagaagggggaggganggatcaagctggtantacatgccaaagatacctntnatttaatgatagttgctctggagcaactagcatttaagttcattcgctngctcttttgtgattagctctcancacaccaactttctaggatttccgtaatgctagttctgtctttgtcgatatggagttcacctatggtgatggcccatctgtacttgtttataaataaggaacacatagattttagaaaatcaagtaaagcanaattaattngcagaacagtntcaacagntatcattgattagtctttggagaatcaagagtttttattttctgagggtggggtgaagtangatgttttattgaaacagngtcccccttaccaacnatcatttattgctctggaaggacttaaggcttcatggtaat

SEQ ID NO: 62011 - DNA, 302 bp, Homo sapiens
cgggtggcggccgggtcaacgcagagtcccgggaagcagtggtaacaacgcagagtcccgggaagcagtggtaacaacgcagagtcccgggaagcagtggtaacaacgcagagtcccgggaagcagtggtaacaacgcagaggctttcagcacagcccagggtgcccgggactgaaaactccttcaccagccccctccacaggatatagaagacttagatcactacgagatgaaagcagagcccattagtgggaaaaagttggaggatgaaggaattgaaaaaaaaaaaaaaaaaaaaggtt

SEQ ID NO: 62012 - DNA, 541 bp, Homo sapiens
gcgtccgacttcttatgagaaatccacattttatccaacaaatgattattctataattttttccaatatatctattctaattagttcttctccacatcagcacatttcatgctgcctttgtttatctaactgattgtataacaatttttcaaatttgtttttaaaattaaatattattttttgccttaatagcttctaaaagatcctccacacatctagaaaacttatttctattttaaaacaaaggttacattaatttctttaacaaggacatcacattgttggattgtgttgaacctgtgatgaaataaaaggctcaaggattttctcacataaactctgtgaaaacatttcctcaagtgtctgtgcaatgaatgtttagtgctataaatccatctagtgtgtaccttgattttagcatttatcattatatcttcattctacttcatatattcaatattcatgtcctttcatatgtatacatagaaggaagagatcctgaaggacaggacaaagattcattaaaaaatattcctagtgc

SEQ ID NO: 62013 - DNA, 365 bp, Homo sapiens
ccgcggtggcggccgaggtaccctctcatatatgcaaacaaatgcagactagggcctcaggcagagactaaaggacatctcttggggtgtcctgaagtgatttggacccctgagggcaggcacctaagtaggaatcccagtgggaagcaaagccataaggaagcccaggattccttgtgatcaggaagtgggccaggaaggtctgttccagctcacatctcatctgcatgcagcacggaccggatgcgcccactgggtcttggcttccctcccatcttctcaagcagtgtccttgttgagccatttgcatccttggctccaggtggctccctcagtctggactctaccacttgggtctccagatt

SEQ ID NO: 62014 - DNA, 390 bp, Homo sapiens
ccacgcgtccggtgtatggctgtgtctacatgtgtggtagattcacgtggcgagtggagtgtgacatgttgttgagacttactctgatgcgcttatctgccaactgtgaaatgaaatagaagacagggaggcttcgtatgtgtactttgtgtacaacaatgcgcggttcctacaggaggtgtccatggatctccctctctgtctgtctctctctctgtctctgtcactgtcttctcacgccactttctccatctcttttccctcccagccagaccctgccgtctctccctctgggtcctcctgcccacatgtcaggaatctctgcctggacggggtcctcactccccaccgaggcagctccaggggacctggagggcttcaagcttgggg

SEQ ID NO: 62015 - DNA, 315 bp, Homo sapiens
cgcgtccgcactgcctctgtctctgtctctcatacacatatacacacacacacacacacacacacacacacactctctctctctctctctctctctccagtggctgttaagttctgaaggactggggactgttagacataattgaaagtaaggtaacaggctaaggagaagctcagtttgaacattgcaatgtaaagtcctcaaagcctgtgactttcaagtatttctgttgcattaattgtattttcctgcttagctgtgttcagacatagtatttgcatttcttggagctttcattccaacagtctaacattt

SEQ ID NO: 62016 - DNA, 417 bp, Homo sapiens
  misc_feature 223, 235, 237, 387: n = A,T,C or G
aaggggattctgacggagtcgtggtcacaccagctggccctgcgcagccccatgggaaataggcctggaattcctgtcgggaggaggctgggggaaggggagccagcagggattccagagttcctgccataggccggcctttggccatcagggaaagcccagactctggccacagaatggagaattcgttccgtgaccttaccagggaagaaagtgaccccgnaagacagcaatngncttcttgttgaaggggcacattcatttattaatccaatgtccattaaggtcactctgccaggcaggatgtggggcttatggctggtgcgtgtggctttgtggggggaggggttgtggctggtgaggacacaaagctgactgccctagaangagctcagagcctcacttctgttttctctt

SEQ ID NO: 62017 - DNA, 392 bp, Homo sapiens
  misc_feature 34, 38, 48, 55, 60, 65, 73, 105, 123, 138, 149, 150, 151,157, 160, 161, 172, 191, 198, 238, 267, 284, 285, 288, 293,294, 302, 320, 322, 323, 327, 331, 332, 342, 345: n = A,T,C or G
atgtggctctgaacatgaccagtgcctccagctnccanatgctgacanggtgcanatgancatantcactggnctgttctctggtggcacttcactgggccgganagctggtgctgagccagnggatgggcatcctanccaccatcgannngctggnggnngcgggcctggntgacctactgagcacagcncaacagnaacaacatgctcacctatagtgatcacaggcctatttggntttgcgatcctatatctgctgctggtgcncatgtgctacatatcannacngctanntcagcagnaaaccctcgagggacacngnnggangcannggacgccttntgncaggtgggccaacaaccgctcattgccgtggcactgctgggcaacat

SEQ ID NO: 62018 - DNA, 621 bp, Homo sapiens
  misc_feature 14, 23, 44, 47, 49, 77, 91, 125, 200, 233, 235, 277, 280,296, 307, 310, 324, 342, 349, 359, 361, 371, 373, 392, 406,415, 448, 452, 478, 505, 525, 531, 554, 609: n = A,T,C or G
gggggggctggggnccgggaacnccgttatcaaaacaaccaatnggntnggatccaacctttgtggggaccatgagncgtgtttggactcntacctaaaaattaacattgggtttggcattagtncctcaaggaaaagagggtggccaatcgtttttattttttagggggggttaataaaaaccaacgaggaccgtgagngggttttaataaggagaattatattggaccacngnaatggtttctccaccttgtctatccaaccattgtagttgtanttnttgttgaaaaaacccnccttgtaatancanccttgtttaaatangtggaaggggccaaattnggaagcnccattgggantnggaatcattngnaggcggtatttttcggccnaacccaaggtttangaccacganggggggggtttaaacaaaattggaaacaagttngggnaaacccctttttagggccctttgggngggaataattggggataaaataattcngggctcggaaaggcaaaaanttaaanttttttgggggggggggggcccnttaggggggtccttcaaaaaaaattaatttggggattgggcccaaagggggttcntttcccaaaagg

SEQ ID NO: 62019 - DNA, 567 bp, Homo sapiens
ggggaaacttttaactccaacaggctcattgtatttgtgtagatttggttcattttgcaaagagggttcataaaattatgggaaaccttttccctattgtactgggagcatctctgggaaggtgcaggttattcccctgcccacaaccaccaccaattgcagggacaagaaatactgctcttccgtccacccactcccttcgacaaaaatctcagtacagttctcattgctgctgtcctaaaatattcttccccccttcctacatcatacacactgccgcctgcttaatcttcccagaatctgtcatagtatctttctctctaaggccacccatgactcttctttacttcacagttaaggcgagtaccgtcctttctcagtaactttgtttcccactattctgccccggtcactgcagagcccacagtcacagactcgttctaacagtggattcacccacacgttccctaggctcatcattacagcctctgctgagttacaggcaacccgcaccttcacacaccttttgcctaactgacctatttattatttccatcatataactca

SEQ ID NO: 62020 - DNA, 473 bp, Homo sapiens
caggttttacccactggctctaggttttgcttacgttgcatgaaggttgaggggaggctttcactctgcgaacttgaaattggttgtgatcccatattctttgattagaacgtgaaaagtaatttgatgaagcatgcgtgtgtatcatcttggcacatgctacctttaatacttgaatgcataatgtttttattcctggagccactaaatggtgagaggtggtcaaccaaggcaaagggcggtgtggggaaaatgaagaaaggctgagacagctaaaagtttatccctattctcccacctgtgacaagatttccaagaacacagtaatgatggagaattgccactatgtgtgaacctagccatgggcatacgcttatgagcgggcgcagggaagataggctttcgctctaagattaaacatgcgctaagccacttattaccacaaggcgcacctacaccccttatccccatac

SEQ ID NO: 62021 - DNA, 328 bp, Homo sapiens
  misc_feature 42, 87, 103, 144, 160, 197, 319: n = A,T,C or G
caacgggactgtaaattgacatgcaactatggaaacggcggntgccagcacacgtgtgatgacacagagcagggtccccggtgcggntgccatatcaaggggngtgctccataccgacgggaagacatgcatcggggaaaggcnggctagagcagcacanccccactcaagccgtttctaatgagacctgtgctgtnaacaacgggggctgagacagtaagtgccatgatgcagacgactggtgttcactgcacctgccctgtgggcttcatgctgcaagccagacaggaagaacgtgcaaagatatagatgagtgccngcttaaaca

SEQ ID NO: 62022 - DNA, 274 bp, Homo sapiens
  misc_feature 7, 15, 131, 217, 229, 260: n = A,T,C or G
ccgcggnggcggccnaggtacaccaaatggattacaagcagcatccagcagaagacagaccccccaaccctgcccaccagggctcacactctacaaaaccctgagggcctagaaatctgtaaatgcatcgncaagcactggggctgatttgcagtaattctctaagcaaggcaaacatgatctagctttgaaggcagcatgaaggcagcgggttggngagaacaatctntccttaagagaagaagaaacctggggcgganggagttttccccgg

SEQ ID NO: 62023 - DNA, 487 bp, Homo sapiens
gtggcggccgaggtacatggtaaatcagtctttacaaaggcttatttttccaggcaggaggagaggctggtggtcttgagcttttggcctggaattccagtctgaattttcaaatattccctgcctccaacccctttgggtcctagtcttcaagccaataacagagcaggagtctgaccctgttctgttgcctggcacggctgaatcaaagccattctggaagcagatgttaaggtgaacttgtcacttggtatgtaggtccgactcccatcccagaggtggcagtgggccttggctcaagatcaagtttgaactaaaatattacttggatttttcacaaagagtgtccgttgaaagcaataaggaattccagaacagaactgcacttcttgtccctctctcacacttacaaagcttcagaaaacattaaaaatgcattacctcctaggaattacaaaagatcacccaactgtacctgcccgggcgg

SEQ ID NO: 62024 - DNA, 456 bp, Homo sapiens
  misc_feature 1: n = A,T,C or G
nctgacagagctgtgcaggtaccagaggtgaaggtgggaacataggtgtagggggctttctggtggcttctctgttctcccagctccctggccttagatcactaaggagcgccgtctgggcgggcttgaggcaaagggagtggagtcaggaggagattcagtaagggaaaagatgctagagcctccagagcctgtggtgggggctgagtgatgcccccagctgtgagtccctctgggtccttggcctcccggcagtcctcttaggggcccttaagggagagtcccaatcttcctccccatggagtgggtactggctccacaccctgaaggcctgggggggccacatctgctgggtttggggagacgctctttctgtctatgaggggctgtagaagctaccttcctgggcagtgcagctgcttctaagcagtccttgtccttgcgctccatgttttt

SEQ ID NO: 62025 - DNA, 348 bp, Homo sapiens
acgcggggcaattagaaattattgcagaaagaagattcactctcacctgatgaataagtgttcataggtgaaggctacaaaatactaatttgttattatttttaataataatttttgttttgctgagaaagtggatttaccacttttttattttttaatccaaggaggaaaaattatttccaaaccaaatcctaaaaatttttcacgttctaaaccagttcaagaacattgagtaaacagaaatattccatttgtcaaagtttttcttatcggctcagataatgaaaaaattgggataattgaaacaagagaagctattgaaatggcaaaagaacaaaaactcgatgt

SEQ ID NO: 62026 - DNA, 493 bp, Homo sapiens
gcgtccgtataaatgtaatatctctatgttataattctgttgctaatgtcttttttccaagaaaattttggctaatatttctttaggtattcctttttctctcatagtgagggattaaaaaaaaaaaaaactgttgaaaaattagggcgtaaaaatgctaaatgacatgactcatcatgggccacgtagttaacagaagagccagatttggctgcaagtcactagatttccagcctgcagtcctcctctgcaacaacagaccagctctgggatttgttacagtgcctgtgagacattacaggactggaggacccatattatatccattaaaccagtctgaatttggaaatgatggagggtgtagtctaagttgtagggagctttgcaagaacctgtgctggggtccttgatcctggtggaatggggtgtagggaatgagcgcaaatgcaaggggttaaggagggagctgggtagttatcactttttagagtgc

SEQ ID NO: 62027 - DNA, 497 bp, Homo sapiens
cgggcaggtacgcgggatggcacgtgcagcgcaagtaggtctacaagacgctacttcccctatcatagaagagcttatcacctttcatgatcacgccctcggaatcattttccttatctgcttcctagtcctgtatgcccttttcctaacactcacaacaaaacttactaatactaacatctcagacgctcaggaaatagaaaccgtttgaactatcctgcccgccatcatcctagtcctcattggcctcccatccctacgcatcctttacataacagacgaggtcaacgatccctcccttaccatcaaatcaattggccaccaatgatactgaacctacgagtaccctcggccgctctagaactagtggatcccccgggcctgcaggaattcgatatcaagcttatcgataccgtcgaccttgagggggggcccggtacccagcttttgttccctttagtgaggggtaattgcgcgcttggcgtaatcatgggcat

SEQ ID NO: 62028 - DNA, 426 bp, Homo sapiens
  misc_feature 14, 43, 210, 329: n = A,T,C or G
cggccgggtactgngtcatggtaggatgtcctgagacacaatnccctgtatcagaagtagaggatttgcaatcttcatcttctgagtcactagaactatcctcactacttgaagatgatgaacttttggaatctgatgaactatcacaactactcatctggtccattagactagcttctgccctcaagttctctttcgatatcatctatngggaggatgctgggggacatcttatcttcaagatggagaatgttttacaagattgggagtcctggctgaattccacatttgttgttgctggtgttctttacgatactgaattttactgnttccttcaactcttgttttttttacagtggatgttgcttgctgagtttttctaggcccgacattctccaagtatcatggttaataatcaaaaatggc

SEQ ID NO: 62029 - DNA, 135 bp, Homo sapiens
aggtcaagctttgttttttttttttttttttttttttgaggcttggaagtatttaatagcagacaaaatatagttcaatatgaaaagcattatatgagacaaaggcaattttcaaaaattgataaaacattccac

SEQ ID NO: 62030 - DNA, 895 bp, Homo sapiens
  misc_feature 35, 38, 54, 58, 69, 76, 78, 91, 106, 116, 120, 122, 135,157, 169, 189, 200, 221, 233, 239, 241, 253, 255, 257, 264,266, 274, 276, 283, 287, 295, 301, 307, 334, 339, 351, 358,365, 369, 383, 387, 406, 414, 425, 427, 440, 443, 466: n = A,T,C or G
  misc_feature 470, 487, 508, 511, 564, 567, 612, 614, 617, 622, 625, 627,643, 669, 690, 691, 694, 709, 741, 755, 756, 765, 772, 778,791, 814, 818, 850, 853, 861, 894: n = A,T,C or G
tgcgtaggggttccgtaccggggtgattccgaatnaangacctctggaataatnccgnagggtgtcctngcgaggncnccggggggggagnattcgcgacgtgagnttttctcagnaagncnggtcaccgaaggnggtgctcagaaatgtttacacntagatctcacgnttctccaaataaggaagtgnagaccacggcntacctttttgcggacgacctnaagcggagaganaaaacncnttttggttatgnangnaggggangntcatatananaaagttnttanaccacccnccaatnaaggtnaggggccccttaaaaataagtctatgnccccnaaccccacactntttaaangggaaanaagnccggttttccaaangccncttcaaaaaccaactcccnacctttanccccttaaaananaaaaaaaatttcntcnccaaaaataacccaatttaattnaaancgttgggaaaaaccttncctcctttccaaaccaaaccnccnccaaaaatttttggggggaacccccaacaatttcctttaattcccaacccccngcnttaatttaagggaaaaagggtaaaaaccctttaaaaaatttgggntnttnaaggnttnanttttaaaaaggggttnaaaacccaaatttggggaaaaaaaanaacccaatttttttcctttcnnccnttttctccggggccnaatttaaaaaagggccccccctttggggcccnggtttcctaaaggnnaaatttttnaaaaaanaaaaanccaaccctttggnaaaaaaccctttggggaacccanaaanttttttaaaaacccaaagggcccccccccaanaanttaatttncctttaacccaaaaaatttccaaaaaacccccna

SEQ ID NO: 62031 - DNA, 437 bp, Homo sapiens
cccttagcgtggtcgcggccgaggtacaatttctaattgatcctgttcacattcagtgaaatggcattgcatatttatatgttgcttacagcttattgatttaggtaactattgtgtcttccttcactatctgacctgaaaagcactctcttctctatgcactcttatattctgcctttctgcctggagtttgaaatacatgtctctttagtttcttttgcacatgctacattgtgctttagaccggagataatacagtgactttacctcacaaatcatattctgtcaacacaaatctatgaatttagtttatttaaaatcagaacaatttcctacaaaatttttctggaaaatagactcctaacagacctaccagaatcatgcttaaagggctcccttgacacttattctatactgaaggataaattttaaaaaat

SEQ ID NO: 62032 - DNA, 609 bp, Homo sapiens
  misc_feature 1, 3, 34, 37, 38, 41, 43, 51, 57, 60, 73, 77, 79, 87, 105,106, 111, 114, 118, 121, 132, 140, 148, 158, 162, 168, 186,197, 204, 218, 229, 232, 246, 254, 275, 288, 293, 307, 312,316, 323, 334, 339, 345, 363, 367, 375, 389, 400, 429: n = A,T,C or G
  misc_feature 438, 472, 495, 511, 540, 542, 569, 581, 590, 592, 594, 595,608: n = A,T,C or G
ncnttttttttttttttgaaccccctcccgttancannacngncacttgcnacattnatntaaggggggcacngtananatatgggnttaaacccttaccccacnnccgtnggngctnggngaccgtgaacnccgtcacnccgtgtgnaccacgaggntaanccgtgnccacaatgggggatcctnattcttgggcncttgtanaatggcaaagattnaagcgatcatnggnattggagggtgttntcagccantggaagaatttaacaaccctnaagatttaacttnggggngcgacaattttaanaaggngcgnggcgttngagttaaagtngcgtnggattngaacctccttaattggantggngggggaanaaaaagcctaatanggcttgggggnggatcctttaaagccgggcgggccccaanttctttttnttttaaaaaaattcccttttgaaaagggaaaggnaccggccaaataatagggggccncccttttaatttcaanaaattttccaaagcccgttttggggccgngnaccacctcccggggcccttttccgaantttaaagaaagntggggggangncnnaaattggggggcnc

SEQ ID NO: 62033 - DNA, 432 bp, Homo sapiens
  misc_feature 30, 349: n = A,T,C or G
ccacgcgtccggcagccaagccttttgccncctgagccacggagacagccctgtgtccacctccacccctctcccggagaagaccctggcttccttcagcacccagtggagcctggatcggagccgtaccccccggggactagatgatgaactggacaccggggatgccaagttcttccaggtcattgagcagctcaactcgcagaaacagtggaagcagtcgaaggacttcaacccactgacactgtacttcagagagaaggagatggagaaagagtaccgactctctgcaatccccgccttcaaatactatgaagcctgcaccttcctggtttttctctccaacttnatcatccagatgctagtgacaaacaggcccccagctctggccatcacgtatagcatcaccttcctcctcttctcctcatcctt

SEQ ID NO: 62034 - DNA, 419 bp, Homo sapiens
  misc_feature 102: n = A,T,C or G
tcgaccccgcgtccgccccgcgtccgtgggaaggcagataaaatgccaggtctggactgcctctggggataacctcaccctgtgggatgtgaatgaatagcntcttgcctggtaaatccacaggaattgataaggcaggcgcagttctcccaaacaggccttttctctttaagctgtagctgtggtttctgcagcaattttgtttttgccttgaaagaggtgctctggattatcacacctccatgtatgacaatttgtacctgcatggaattgaagactcggaggctgtaagtattttcatagatagctaattccctctcccctcctcttcctcctcccactatcccctccacccccccgcttcttatttcttaggcaacgcagggaacatggagcagaaagctaacatcattctgggg

SEQ ID NO: 62035 - DNA, 395 bp, Homo sapiens
acgcgtccgataaagtaaatgaagaaaaaggcaaatatatttgaatgttattgttacatattcatcaagacacaattcttgctaaaaaggacagcgacgcgctgcttaaatctacattcaagaacaaagcccacatagacacactttcctcagtgaaaaaaagaaaataaggggagaatgaatcccagtcctaaaataaaccattcagagattttgtgtttaaataactattaagagattttgtgtgagttctgtgtatttctacagtgtaatccaggattcactttttaaaacaaaaatgtaaataggcattaaatatatttttaaaaagaaaattatctagttttccttcctacttttttcaagcaattaataagaaagacaaaaattttggt

SEQ ID NO: 62036 - DNA, 147 bp, Homo sapiens
  misc_feature 8, 9, 11, 50, 83: n = A,T,C or G
aggtaccnnangggaaagatgaaaaattataaccaagcataatatagcanggactaacccctataccttctgcataatgaatnaactagaaataacttttgcaaggagagccaacgctaagacccccgaaaccagacgagctaccta

SEQ ID NO: 62037 - DNA, 392 bp, Homo sapiens; identical to SEQ ID NO: 62017
  misc_feature 34, 38, 48, 55, 60, 65, 73, 105, 123, 138, 149, 150, 151,157, 160, 161, 172, 191, 198, 238, 267, 284, 285, 288, 293,294, 302, 320, 322, 323, 327, 331, 332, 342, 345: n = A,T,C or G

SEQ ID NO: 62038 - DNA, 416 bp, Homo sapiens; identical to SEQ ID NO: 62003
  misc_feature 5, 101, 186, 208, 210, 211, 218, 219, 226, 235, 239, 259,280, 291, 298, 301, 305, 306, 308, 320, 321, 327, 333, 334,336, 352, 358, 359, 367, 368, 379, 388, 389, 391, 403, 408: n = A,T,C or G

SEQ ID NO: 62039 - DNA, 567 bp, Homo sapiens; identical to SEQ ID NO: 62019

SEQ ID NO: 62040 - DNA, 346 bp, Homo sapiens
  misc_feature 297, 308, 321, 328: n = A,T,C or G
cggtggcggccgttaaacatgtgtcactgggcaggcggtgcctctaatactggtgatgctagaggtgatgtttttggtaaacaggcggggtaagatttgccgagttccttttactttttttaacctttccttatgagcatgcctgtgttgggttgacagtgagggtaataatgacttgttggttgattgtagatattgggctgttaattgtcagttcagtgttttaatctgacgcaggcttatgcggaggagaatgttttcatgttacttatactaacattagttcttctatagggngatagattggnccaattgggtganaggagtncagttatatgtttgggat

SEQ ID NO: 62041 - DNA, 437 bp, Homo sapiens; identical to SEQ ID NO: 62031

SEQ ID NO: 62042 - DNA, 391 bp, Homo sapiens; identical to SEQ ID NO: 62000

SEQ ID NO: 62043 - DNA, 541 bp, Homo sapiens; identical to SEQ ID NO: 62012

SEQ ID NO: 62044 - DNA, 315 bp, Homo sapiens; identical to SEQ ID NO: 62015

SEQ ID NO: 62045 - DNA, 531 bp, Homo sapiens; identical to SEQ ID NO: 61991

SEQ ID NO: 62046 - DNA, 659 bp, Homo sapiens; identical to SEQ ID NO: 62002
  misc_feature 29, 31, 51, 105, 111, 281, 341, 367, 502: n = A,T,C or G

SEQ ID NO: 62047 - DNA, 360 bp, Homo sapiens; identical to SEQ ID NO: 61979
  misc_feature 6, 15: n = A,T,C or G

SEQ ID NO: 62048 - DNA, 431 bp, Homo sapiens
  misc_feature 102: n = A,T,C or G
tccgctaggtccccagatggggaagactgaggccgtggctgtgtgtccctctgagagttggagcggggctgggcccgaattcgaccgcagcaggattctctntcatttctgagccccggaggtggcagagcggcagacccgggcaagtgaaccctagggctgcaggagcccaggccccgacgccggcgcagaggggacggaagggcccgcccccagcccagcgtgcacagaggccatagccaaggccttaaggctcatccaaccggggactcatatcccccccaccggcagcccggcgccccagcctctacccgtgcccgccgagatgctgctgccgcggtcggtgtcatcggagcgggcccctggggtgccggagccggaggagctgtgggaggcagagatggaagccggctgcgccggctctgggaccg

SEQ ID NO: 62049 - DNA, 365 bp, Homo sapiens; identical to SEQ ID NO: 62013

SEQ ID NO: 62050 - DNA, 180 bp, Homo sapiens
cgcgtccggggaatagtggaatgaaggttcatttttcattctcacaaactaatgaaaccctgcttatcttaaaccaacctgctcactggagcagggaggacaggaccagcataaaaggcagggcagagtcgactgttgcttacactttcttctgacataacagtgttcactagcaacctc

SEQ ID NO: 62051 - DNA, 367 bp, Homo sapiens
attggagctccccgcggtggcggccgcccgggcaggtacgcggggaggaggcggaagcgcagcgggggcgggaaggttgtagtgccgcgagttgagctcctcttgcctaagtggtcgcgccccctttaagagcagcgattgtaaggagaggcggtcccggtgtcctcgggtcccaggtgattgtgaagtgctgaccaattgccactggacatacttgaaacaaaataggaaaatggcagcaaaccctgtctctaaatcaatcaatcaagcgagccagaatgcagtagtggcctgagagaggcatcctggaacgcagtgcggtctggctaggcttagaagtattcatgtgatttttacctgacaaggg

SEQ ID NO: 62052 - DNA, 419 bp, Homo sapiens
  misc_feature 46, 48, 53, 137, 152, 156, 159, 166, 167, 171, 174, 204,208, 210, 213, 216, 229, 232, 236, 250, 251, 253, 255, 259,264, 266, 268, 269, 271, 275, 292, 301, 302, 310, 321, 323,329, 342, 348, 350, 365, 375, 381, 383, 398, 399, 400: n = A,T,C or G
tcaggctcgaggacatacgctcccacgtgccctaacgccatcgagngncctancgctacctctagcgcagaatgatgcccacgcctcgtactacccaccctagagcccggtccatcgtgggaacgtggatttacatnggtaagggaatttancaancgnccggaanntttnggnccgacccttagttgcgtcggatgcgttacntaanancanttngaacccttttaancanggtncttaaccaattggnntngngggncgccnantnngntaancgcaatttggaaaatgnaaccatagnncaacgttnggaaccacganangggaancaccttgcggccncttggngnaaatctcccacgatngaaaaccgcnttggcntnggttcgcgctctaannnaaaggtaggacgcgcactt

SEQ ID NO: 62053 - DNA, 464 bp, Homo sapiens
  misc_feature 48, 62, 254, 256, 257, 295, 360, 361, 362, 367, 400, 406,428, 456: n = A,T,C or G
accccgcgtccgtaggatggatctgatctgaaaagcaaacattcaatntaaatttcaatagntctctgcttgtgcttgatctagtaatgtcttttcaaaagggattatagaaggtgaatgttaaaacaaatcattttgattttccatagtgagttaagaaatacattttgttgttcctcttctgctttctaagtaatatgttgggcttctttcttgttttgtcgatgtgaggcatagtccgaggaaacctttgntnnctataaatcctgatattctttggattggaagaggcagnttcctgaataagaaagagtctgactacactgggtaaattgtcagattattttgtcctcacagaannnaaagngtaaaattgggtgagggcattgctttgaaagantatttntatttattcttttaaagaaagnagattaataaaaagattgatcagttcanatacctgg

SEQ ID NO: 62054 - DNA, 379 bp, Homo sapiens; identical to SEQ ID NO: 61980
  misc_feature 14, 16, 20, 21: n = A,T,C or G

SEQ ID NO: 62055 - DNA, 536 bp, Homo sapiens; identical to SEQ ID NO: 61976

SEQ ID NO: 62056 - DNA, 400 bp, Homo sapiens; identical to SEQ ID NO: 61999
  misc_feature 29, 84, 108, 132, 158, 164, 184, 188, 192, 200, 202, 215,217, 219, 232, 237, 270, 274, 345: n = A,T,C or G

SEQ ID NO: 62057 - DNA, 429 bp, Homo sapiens; identical to SEQ ID NO: 61977

SEQ ID NO: 62058 - DNA, 321 bp, Homo sapiens
  misc_feature 5, 106: n = A,T,C or G
cgccncgcgtccgcactgcctctgtctctgtctctcatacacatatacacacacacacacacacacacacacacacactctctctctctctctctctctctccagnggctgttaagttctgaaggactggggactgttagacataattgaaagtaaggtaacaggctaaggagaagctcagtttgaacattgcaatgtaaagtcctcaaagcctgtgactttcaagtatttctgttgcattaattgtattttcctgcttagctgtgttcagacatagtatttgcatttcttggagctttcattccaacagtctaacatttt

SEQ ID NO: 62059 - DNA, 333 bp, Homo sapiens; identical to SEQ ID NO: 62004
  misc_feature 48, 107, 112, 149, 165, 198, 210, 226, 241, 279, 312, 331,333: n = A,T,C or G

SEQ ID NO: 62060 - DNA, 473 bp, Homo sapiens; identical to SEQ ID NO: 62020

SEQ ID NO: 62061 - DNA, 515 bp, Homo sapiens; identical to SEQ ID NO: 61995

SEQ ID NO: 62062 - DNA, 225 bp, Homo sapiens; identical to SEQ ID NO: 61984

SEQ ID NO: 62063 - DNA, 274 bp, Homo sapiens; identical to SEQ ID NO: 62022
  misc_feature 7, 15, 131, 217, 229, 260: n = A,T,C or G

SEQ ID NO: 62064 - DNA, 656 bp, Homo sapiens
  misc_feature 31, 36, 52, 73, 77, 81, 110, 119, 124, 126, 142, 144, 161,165, 167, 168, 170, 171, 181, 182, 185, 187, 191, 195, 199,203, 230, 262, 270, 271, 274, 293, 309, 314, 329, 340, 353,355, 360, 405, 412, 423, 443, 449, 472, 475, 476, 497: n = A,T,C or G
  misc_feature 505, 508, 521, 533, 553, 572, 581, 588, 589, 592, 597, 599,626, 638, 643: n = A,T,C or G
tagtttttccttaaggaaggccgcggccccngaagnggttaccccgtctatngggggggaaaaaaggaatagnacanaaanatttcattaaaaccccaaaagcccattanaattatttntggcnanagggagggaaccttantnccccacttttttttaantctncnntnnctctttatcnnttngngggntttnttanaccntaaagcaaaaaattaaaaccttttttngccaaaagggggagggaaggccccaaaaaagnccttaaanntancccccccccgggaaaaaanccccaagggaacccgnaaggnccttatccccttaanagggaaaaccnagggcctttatanantaggnaagggccaacccaaccccccccggttcctttaattgggttaaggnccaaaanaaaaatttaangctttggggggggaaaaagngaattntttttaatttaaggggggtttanagnnaagggggcccggaaacccaanaaaaaccnccnttaaccccccggnaaagggcccccnttggggggttgggaaatttnaagggcccttgggggtttnttggttccncccaaannggnaattnangggaaaaattccttttaaaagtttttnccaaaaaccctnttttnaaaaaaatttttt

SEQ ID NO: 62065 - DNA, 438 bp, Homo sapiens
cgacccacgcgtccggaaaagaaaagaaagaaaaattctcacagtgcagtagccccctgaggtgggtagtagtatctcttgggcataagtaagtaacatgaatatgcctgagagatggtgactttcccaaggcctcacagtgaataagccgtgaagcaggtttggctcccaaacctctggtttttcctcctctactctgctgaattcctttgagcaacagatagtaaattagagaatgaagagttggctgtaaagtttcgtcctttgcagctcacctcaaatgctctccccagtgttctttcagtgtagtcttaatcagactattcaactcctcatcaccccagacactggtagtatctggcaccaggtaggtactcagtaactctttttattttttatttattttttaaaatttattttattttgggacggagtctt

SEQ ID NO: 62066 - DNA, 454 bp, Homo sapiens
  misc_feature 6, 277, 359, 410: n = A,T,C or G
gctggngcggagctcagcgctgaccctgggtctggaagcgacaggccttgaaactccacagcagcacaggccccgtctcctggctcggacagaaccctgctaccttccctcttcaatcttcaggcccctttttgtccgtgtttccagggctcacctggtggggaaagtgtgtttctccctggttccctgccactcattcacctcagacacagggtgggctctgggttcttcctcatgtggaaagtcggggcttcagaccatgtctgtcggcattcanaagggatggaagtcaaaagtgaggctggaagtttgcaggatcttcagacttccctgaggccactgagctgggctgtgcctgngtggacctcagggtggtcgctgagctgggctgtccctccctggaccttgangtggtccctgagctggctctgcctctatggaccttgcggtggtg

SEQ ID NO: 62067 - DNA, 487 bp, Homo sapiens; identical to SEQ ID NO: 62023

SEQ ID NO: 62068 - DNA, 895 bp, Homo sapiens; identical to SEQ ID NO: 62030
  misc_feature 35, 38, 54, 58, 69, 76, 78, 91, 106, 116, 120, 122, 135,157, 169, 189, 200, 221, 233, 239, 241, 253, 255, 257, 264,266, 274, 276, 283, 287, 295, 301, 307, 334, 339, 351, 358,365, 369, 383, 387, 406, 414, 425, 427, 440, 443, 466: n = A,T,C or G
  misc_feature 470, 487, 508, 511, 564, 567, 612, 614, 617, 622, 625, 627,643, 669, 690, 691, 694, 709, 741, 755, 756, 765, 772, 778,791, 814, 818, 850, 853, 861, 894: n = A,T,C or G

SEQ ID NO: 62069 - DNA, 348 bp, Homo sapiens; identical to SEQ ID NO: 62025

SEQ ID NO: 62070 - DNA, 323 bp, Homo sapiens
  misc_feature 8: n = A,T,C or G
ggagctcnccgcggtggcggccgaggtactttttttttttttttttttcgtcactacctccccgggtcgggagtgggtaatttgcgcgcctgctgccttccttggatgtggtagccgtttctcaggctccctctccggaatcgaaccctgatttccccgtcacccgtggtcaccatggtaggcacggcgactaccatcgaaagttgatagggcagacgttcgaatgggtcgtcgccgccacggggggcgtgcgatcggcccgaggttatctagagtcaccaaagcccccgcgtacctgcccgggcggccgctctagaactaga

SEQ ID NO: 62071 - DNA, 392 bp, Homo sapiens
cgcggtggcggccggagtgatgccatctgcagttttgtgatctgcaatgattcttcccttcgaggtcagcccattatctttaatcctgacttttttgtggagaaactccgacatgagaaacctgagattttcactgagttggtggtcagcaatatcacaaggctcatcgatttacctggaactgagttggctcagctgatgggggaagtggaccttaagttgcctggcggggctggcccagcatcaggattcttccggtctctcatgtctctcaagcgaaaggaaaaaggagtgatacttgggtccccactgacggaggaaggcattgcccagatataccaactgattgagtatctacacaaaaacttgcgagtagagggtttgtttagagt

SEQ ID NO: 62072 - DNA, 525 bp, Homo sapiens
ccgcggtggcggccgcccgggcaggtaccattaaagcctcatgttttatactactaggtcaaattattttttctcctttttaaaatttatcggttccgacttaaaaccatcaagtctggtcagaatcaactcagtctagctgatgcaaaatcatatgcattcaaaaagcagtctttaccgagatgcctttacaaaccttggaatccagcaccttcttaaggcaaagtttcatggcagcagggaagtgaactaataattttcatttaccacatcttggtgtctttgaaaaaatactttatggcacaaacctgtttttgtctctccttatgtctccacttccttcaagtagactagatgctacaggcaatttctcatttatgccaccatgcagtctcaatccattttcaacttgctctacatacctaaaatcttccactactacacaaacctcagacacactgcaatctccacagcatgtgtgctccacagcatgtgtgctccacactttcagctggccctgggttc

SEQ ID NO: 62073 - DNA, 338 bp, Homo sapiens
gtggcggccgaggtacgataattcatgccaatttctttgggaatacttgtttctgatataataggttacaaagcaaaattgagatgatttttaaaatgccatgcagttattttttctgaataacataaattttaaacagagacctgaaaaaaaccccaaaagtattaacctttaaatacataaactcaatagaaataatttaactgccttctcttcacaagaggcaatcagaaggcaggactatagttttctgtgtttcttttccacaggagagataattacatttctagagacccatagaaacaattccatagttttaatttcatctctctatctct

SEQ ID NO: 62074 - DNA, 432 bp, Homo sapiens
ggcccatcctgctaaaagctcagcacactctcttcaggtctctgctgagcccccagcagagcttgatgctcttaaactgtgctcgcctaagagatctacccttgctaattcttaccctgtccatgtggccctcaggttcctcatgtcacagggaggccctggtgtgatgagagagttgtgctctctgtgacagtcagatagaaaattgttgccttgtcatcaaggtaatggggtggtgggtgagaagtggacccttcaccagagagatctgggtcagagagagatttgatccctctggagagatccctcaggagagattgcccctgattccagttgattacaaggctgcaactgggtctggagacttcactccaaaaggtgggagttccccttggggatgggaccaaagaggtacatggggttgtggggctg

SEQ ID NO: 62075 - DNA, 305 bp, Homo sapiens
acgcggggatgtctcttgtcagctgtctttcagaagacctggtggggcaagtccgtgggcatcatgttgaccgagctggagaaagccttgaactctatcatcgacgtctaccacaagtacaagagatagaaagaccagtccttgctgaaagacaagtctgaatgctccactttttcaattctctctccattcttcagtaagtcaacttcaatgtcggatggatgaaacccagacacatagcaattcaggaaatttgactttccattctctgctggatgacgtgagtaaacctgaatctttggagt

SEQ ID NO: 62076 - DNA, 271 bp, Homo sapiens
actgcaagcaacagttactgcgacgtgagatcatcaagaacacgtagagaaacccagctgtaatcatgcatggagatacacctacattgcatgaatatatgttagatttgcaaccagagacaactgatctctactgttatgagcaattaaatgacagctcagaggaggaggatgaaatagatggtccagctggacaagcagaaccggacagagcccattacaatattgtaaccttttgttgcaagtgtgactctacgcttcggttgtgcgt

SEQ ID NO: 62077 - DNA, 218 bp, Homo sapiens
ttggagctccacgcggtggcggccgtcgcccgagctttctcttgtccatcttctcccgctgctgaaatttcagttgcgggcgctgtcacctcaggacccctccccccgcgtacgctggatagcctccaggccagaaagagagagtagcgcgagcacagctaaggccacggagcgagacatctcggcccgaatgctgtcagcttcaggaatccccgcgt

SEQ ID NO: 62078 - DNA, 49 bp, Homo sapiens
  misc_feature 14, 15, 32, 35, 41, 43: n = A,T,C or G
caccaggggacccnnggacccgggcgacggcnganccaacncngaagga

SEQ ID NO: 62079 - DNA, 376 bp, Homo sapiens
ttggagctccacgcggtggcggccggggtacaagagatagaaagaccagtccttgctgaaagacaagtctgaatgctccactttttcaattctctctccattcttcagtaagtcaacttcaatgtcggatggatgaaacccagacacatagcaattcaggaaatttgactttccattctctgctggatgacgtgagtaaacctgaatctttggagtacccattcccttgatgtctacaatatcacctttcttatagattcgcatatatgtggccaaaggaacaactccatgttttctaaaaggcctagagaacatatatcgggtgcctctcctctttccctttgtgttcgtcattttggcgaattactggaagatg

SEQ ID NO: 62080 - DNA, 163 bp, Homo sapiens
gtggcggccgaggtacttaaaaccaaataaaaagtgacatttgaatttcttttaaaaggatttccgagctcacagtcagcttgcgagccattctcccgcgtaccagcacaaaccgggccagcctcctaaactgctcatttactgggcgtctacccgggaatcc

SEQ ID NO: 62081 - DNA, 37 bp, Homo sapiens
ccatgctgtgtcctgactgagactgactcccccgcgt

SEQ ID NO: 62082 - DNA, 308 bp, Homo sapiens
  misc_feature 93, 145, 152, 289, 291, 296, 308: n = A,T,C or G
ccgcggtggcggccgaggtactaaggctgtggggaaagagaagagcagtcatggccctgaggtgggtcagctactctcctgaagaaataggtntcttttatgctttaccatatatcaggaattatatccaggatgcaatactcanacactancttttttctcacttttgtattataaccacctatgtaatctcatgttgttgtttttttttatttacttatatgatttctatgcacacaaaaacagttatattaaagatattattgttcacatcaaaaaaaaaaaaaananaaaangacctgcccggn

SEQ ID NO: 62083 - DNA, 143 bp, Homo sapiens
tccccgcggtggcggccgaggtacttttttttttttttttttatgaattatttattttctttctcagaaaaggatgcgcctccacttagcaaggctgggcaggatgtggttctgcatctccccacagacggggtggttctaga

SEQ ID NO: 62084 - DNA, 163 bp, Homo sapiens
gtggcggccgaggtacttaaaaccaaataaaaagtgacatttgaatttcttttaaaaggatttccgagctcacagtcagcttgcgagccattctcccgcgtaccagcagaaaccaggacagcctcctaagctgctcatttactgggcatctacccgggaatcc

SEQ ID NO: 62085 - DNA, 310 bp, Homo sapiens
taatattctatttggtattatattatttgatgtttgctgttcttcaaacatttaaatcaagctttggactaattatgctaatttgtgagttctgatcacttttgagctctgaagctttgaatcattcagtggtggagatggccttctggtaactgaatattaccttctgtaggaaaaggtggaaaataagcatctagaaggttgttgtgaatgactctgtgctggcaaaaatgcttgaaacctctatatttctttcgttcataagaggtaaaggtcaaatttttcaacaaaagtcttttaataacaaaag

SEQ ID NO: 62086 - DNA, 546 bp, Homo sapiens
  misc_feature 97, 164, 171, 178, 398, 427, 494, 529: n = A,T,C or G
gaggagcttactgtgtcgtggatattctttgaaacggtttatttcactggctcttacttttgttcttactaagaatgctgtgtttaggaaaacatantgagaaaattctctttggattaattactgagaaactgcatgtatcaaaacatgcactctttgcatanataacanagaaagntgctattttagcaaaaataatcaatttaatgaacacataagcaagagactttgttttgactagcgtttgttgttaccttctctgaagattacagtgtttgaatttgatctaagaagtgttaaaacaaaacgtgtctaaacaatgaagcttgataatttaacgttttttaaaatggtgaaatataaatgatcagtgaaagagttggagatgggtatggttntctcatctgtaggggtattcaggagccanattgcttaattccaactctctatcaagggaacattaatattggttgtgtcacagtgtttccctttgncacttcatttatttggcctaccgagagaaggtaangaatgggaaagagatta

SEQ ID NO: 62087 - DNA, 580 bp, Homo sapiens
tgaatgagagcactagttctataagaacttataaattctgtggctaatctgatggatcaggggagactttcccggtgtaagtgataattgatcagttgtaccagttgagctaatatagaaaagatacatataacctaattattctaagtggtggctaactaacagtacaggcagaaagaagaacatgtgaaaacccacattgcaggagggaacatggacagatcaaggaaccaaatgaaagacagtgtgacaggaatgcaaagaggaacaggagcaagatatgggatggggccaaagagaccgatggaagccactctatgaagagcactctagactttgctgaaactttgggtctctaacaaaaaatcagtgggaggcctttgacatgttgaaagcagggatatggtgtgttcatacttctggtttggaaagatcactctggcagcagtgaggatgacatggaacgaggaaaaaatagatgtagagacaaattagaaactatcacagtcctctagacagaaatgcttttaacacgaattaagatggctggtgatgcacatgggaaaaatagcatattaga

SEQ ID NO: 62088 - DNA, 427 bp, Homo sapiens
ggtggcggccgaggtacgcgggataatcaaggtgtcacatcccggtggctggacatgccctcttgggcttggcagatgccagtggatccatacaactactccgcctggtggaatctgagaagagccacgtgctggagccattgtccagccttgccctggaggagcagtgtctggctttgtccctagattggtccactgggaaaactggaagggccggggaccagcccttgaagatcattagcagtgactccacagggcagctccacctcctgatggtgaatgagacgaggcccaggctgcagaaagtggcctcatggcaggcacatcaattcgaggcctggattgccgctttcaattactggcatccagaaattgtgtattcagggggcgacgatggccttctgaggggctgggacaccagggtacc

SEQ ID NO: 62089 - DNA, 172 bp, Homo sapiens
ctccccgcggtggcggccgaggtacttaaaaccaaataaaaagtgacatttgaatttcttttaaaaggatttccgagctcacagtcagcttgcgagccattctcccgcgtaccagcacaaaccgggccagcctcctaaactgctcatttactgggcgtctacccgggaatcc

SEQ ID NO: 62090 - DNA, 280 bp, Homo sapiens
gcggcgggtccacctaaaaagtcactgcagcagagaagaaaacattggacaaagaagaaaggcgacagaaggctagagagaggcagcagaaattgcttgcggagtttgcttcacgacagaaaggctttatggaaactgcaatggatgttgattctcctgagaatgatattcctatggagatcaccacggcagaaccacaggtttccgaggcagtatatgactgtgttatttgtggacagagtggcccctcctctgaagatcgacctactggattagttgt

SEQ ID NO: 62091 - DNA, 149 bp, Homo sapiens
ggattcccgggtagacgcccagtaaatgagcagtttaggaggctggcccggtttgtgctggtacgcgggagaatggctcgcaagctgactgtgagctcggaaatccttttaaaagaaattcaaatgtcactttttatttggttttaagt

SEQ ID NO: 62092 - DNA, 373 bp, Homo sapiens
tgagctcaccgggggcggccgaaccgccatcttccagaattcgccaaaatgacgaacacaaagggaaggaggagaggcacccgatatatgttctctaggccttttagaaaacatggagttggtcctttggccacatatatgcgaatctataagaaaggtgataatgtagacatcaagggaatgggtactccaaagattcaggtttactcacgccatccagcagagaatggaaagtcaaatttcctgaattgctatgtgtctgggtttcatccatccgacattgaagttgacttactgaagaatggagagagaattgaaaaagtggagcattcagacttgtctttcagcaaggactggtctttctatctcttgt

SEQ ID NO: 62093 - DNA, 150 bp, Homo sapiens
aggtacctgcaggcctcctacacctacctctctctgggcttctatttcgaccgcgatgatgtggctctggaaggcgtgagccacttcttccgcgaactggccgaggagaagcgcgagggctacgagcgtctcctgaagatgcaaaaccag

SEQ ID NO: 62094 - DNA, 335 bp, Homo sapiens
tagtaatcaacctgttaatccaaggtctttagaaaaacttgaaattattcctgcaagccaattttgtccacgtgttgagatcattgctacaatgaaaaagaagggtgagaagagatgtctgaatccagaatcgaaggccgtcaagaatttactgaaagcagttagcaaggaaaggtctaaaagatctccttaaaaccagaggggagcaaaatcgatgcagtgcttccaaggatggaccacacagaggctgcctctcccatcacttccctacatggagtatatgtcaagccataattgttcttagtttgcagttacccctaaaggtgaccaatgat

SEQ ID NO: 62095 - DNA, 191 bp, Homo sapiens
acctaacctacctttaagactgggataactattggaaacaatagctaataccggatatagttatttatcgcatgatgagtaatagaaaggagcttcacagcttcacttaaaaatgggggtgcggaacattagttagttggtagggtaatggcctaccaagacgatgatgtttagccgggccgagaggctgt

SEQ ID NO: 62096 - DNA, 856 bp, Homo sapiens
  misc_feature 43, 62: n = A,T,C or G
ctctcttttcctcttctactagtacatcatactagagtatctntgtattttcacactgatanggtaaatctgtaataacattattctttataatgataataatctaattcatgatcaattatctatagatcgaatctatactcttacatctcgactctacgatactttaatatagagatgactcccgcggtggcggccgatgtactatggcctatatgggatagaaggtatttaccacgcacacaacaaacgcagttccatattttaactgctcatcatatggcggtaacatggggacatatggtgcaaccacactttcatttgatttaacaccttggtaacccccggccgctcctagaaacctaattggatcccccccggggctggcaggaaattcgaatattcaaagctttatttcgattacccgtccgaccctttgtagggggtggggctcccgggtaaccccaaactttttatggtttcccctttttaagtggaagggggttaaaatttgccgccggctttggggctgttaaattcaatgggctacaattagaccttgtttttccccttggtgttggaaaaaattaggtttaatttccggcttccaacaaaatttctccaccaccaaaccaattaaacgtaagccccctgcgggaggccaattaaaaatgttgttaaaaagacacttgggtgggttgcccctaaaattggaggttgaaagccttaaaccttcaacaatttaaatttggcggtttttgcggcctccaacttggcccccgccttttttccacagttccgggaaaaaccttggttcgtggccccagcctgcccatttaaattgaaatacccggct

SEQ ID NO: 62097 - DNA, 152 bp, Homo sapiens
  misc_feature 1, 11, 19, 26, 134, 148: n = A,T,C or G
nccggccaggncttatttnttttttntttttttcgatgtgaacaataatatctttaatataactgtttttgtgtgcatagaaatcatataagtaaataaaaaaaaacaacaacatgagattacataggtggttntaatacaaaagtgngaaa

SEQ ID NO: 62098 - DNA, 426 bp, Homo sapiens
  misc_feature 2, 20, 21, 22, 167, 368, 377, 398: n = A,T,C or G
gnggtggcggccgggtactnnntttttttttttttttttttttagacagggtctcactctgtcacccaggctggagtgcagtggtgtgatctcggatcactgcggcctggacctccccgggctcaagtgatcctctcatttcagcctcccgagtagctgagactatnggcaagccaccatgcccggctaatttttttgtattttgtagagagatgacatctcaccatgtttcccagactggtctccaactcctgggctcaagcaatccacccacctcagcctcctgaagtgctgggactacaggaacaagccactgcgcccagcttagatgaaatttttgaatgtgacacaggttttttaaatacagnatattcctncaacaacttcaatgtcattgnagattcttggaataaattcactcccata

SEQ ID NO: 62099 - DNA, 176 bp, Homo sapiens
tgagctcaccgcggtggcggccgaggtacttaaaaccaaataaaaagtgacatttgaatttcttttaaaaggatttccgagctcacagtcagcttgcgagccattctcccgcgtaccagcacaaaccgggccagcctcctaaactgctcatttactgggcgtctacccgggaatcc

SEQ ID NO: 62100 - DNA, 360 bp, Homo sapiens
acttgactgctaacaactttcaaattcttctacttactccctcttcttcagcttcacatctgggaaaactgatagggaagcctaggtaggcctacctttggtgccagagggaagctcaatccatgcaagccccagataatatatgagaacctccccaaccttaccctacacccctcacctcccaatccaagccagtctcctttccctgctttctcaaaccatgtttggacctgcttggaagctccctctgctctccctagaaagcttcattatgtgagtgatacatcttttcatatcttcttggtggtgtgtgtgtggtatcatcagcctcaacatctgaagcaaatgttgggggggggt

SEQ ID NO: 62101 - DNA, 490 bp, Homo sapiens
gtactccctggaaagtccagctgagaaagcgatcctgccctctgctcctcccagggttaccctcctgtaagtcttctgcttagtgttcagaattgggggatgctgggactgggcaaggacttgtaggcaacaccccatagcctgctcatgcctgttgggttgcctatggatcattccctgctgggctcactcaccggcttcgtataaggtcctttttgaggtttattatttccttgtccatatacttgatgctcttcattggcttgtctgggacctgccttaggttctccgaggcataaaagggccggacagcccccgagttgggggaactctgaagcttcttggtggctggaaccttggtcatcttaaaaatccttcaggttttagcctgtgcccccaagacaaggatttttccagaatcttctacttcagtagttactggtatgagaagtttcggcaacttctccctgatccccaagtcccaattaca

SEQ ID NO: 62102 - DNA, 358 bp, Homo sapiens
  misc_feature 29, 32, 33, 34, 38, 99, 104, 106, 107, 111, 231, 271, 297,298: n = A,T,C or G
accccgcgtccggacattttattattttnagnnnaaanaaataatattatagatgtaaactttgcacctttctaattattatcatgagttaagctaatnggggngnnttcnggtccctagatgatgattcttttttgccttactggaggagcccttgtcttgaagtgagttgcttcaacagcagaggacttctagttttctcccagttgagcctaaagtgaacttttcatnttcttcagagggaaggggctttccttgatttgtacttttntgtggctctctcagataacacaagannaaatatttaattctttgggatcccagagttcttctttcaccaatttaaggaaattaagga

SEQ ID NO: 62103 - DNA, 401 bp, Homo sapiens
gcggtggcggctgcccgggcaggaccgcggaaatcccctaacttccttgctatcttcccatcccatatttaggttagatagagaagtgtgtatgtgtgtgtgtgtgtgtgttgctcgcacagtgatgaactgtaaacataaatgaagatatggaaaaatacatcaattaggacaacatgacaatttcattagactcctatcaaagagtatcagttcacagtttttatagatactagtataaaattcagatcttgactgttttctggggataaagcaaggctttacaatttagcagtctgtagctagcttgaaacagtaaaacaacaacagcagagccttaagtgtatttttgtgacctaaaacatgaactcagggtttccaaattcctaacaatgaatagt

SEQ ID NO: 62104 - DNA, 55 bp, Homo sapiens
gcggccgcccgggcaggtacgcgggggagtcagacccagtcaggacacagcatgg

SEQ ID NO: 62105 - DNA, 205 bp, Homo sapiens
  misc_feature 196: n = A,T,C or G
ttttttttttttttttttggaggagatggacagtgtcagtctcctgataagggggtgatgggtaggtaatttaaaagcttctattataaaatctagtctctctgacactgccctgtccactgcagtcacatctcccaatactgaaggatcctgagaatacgagcgggcatgacacttactcacgtcattcaccatnctcgttgtg

SEQ ID NO: 62106 - DNA, 588 bp, Homo sapiens
ccgaaaaaatatgccagatggtccttttctagaagattatcttttagtttgggaacaagataattatataggaaacaaatagaggacaacataaaagcaccatataataagatgttaatttgtctgatacagactgtagaagtttttcatttcagagaagggcaaagttagtaagactgaggctgtcagagaggaccatgttggtgaaatgggacttgagctagtatttaaagaataagacatgatatggcagaggaggagagggagctgttttcattgtgactgtctccacttgagcttttctaagcctcactaattttgtgtcctggttagaccagaaacagacttaactcctcagtcattcatgtgatttataaggccttttaagtatctctcttcctttacttcctattactcccagtgtaatctcgtagctctagaaattctttcttaatagcccatgactacactaagcttatcctcacttccatacctttagagagggaagcaaccttggagatcatggactatctctcctcataacagaagacatttaagtctctctctagatgagagaatggttaataa

SEQ ID NO: 62107 - DNA, 584 bp, Homo sapiens
ttccctactggcctaaagcactctagttttcaggaagattacaaagtttttccagatatagccattttggaaagagtgaaataaagaagaattaataaaagcatattctctaaatcccagtccaagatgttgaggttaatggaaaccacaaaatccttcttcgtgagctgagacgaataaaatcatttatgaacagggcacaatttttgggcggtaagcttgattgagcttgatgaagttaaattaaagagaaagtatattcaacattctgggatccccacagtgttgagattcgtgaaatcagccacatttgaggagttttaacttgcctttttatgggagactctttcatatacatgcaggatgcagagcgtccttagcacaaaggactctactaaatataactttcacaacagcctctaaagccagttggttacctctcacctcattagcaagcaggctttgaattccaagtgccccgcatgataaataagccttgagagctactttcacattttgtgtaacaatttcctgcagtgacttcaagtaggaaaaaaccaggtaatgtttgaaagacatcatga

SEQ ID NO: 62108 - DNA, 567 bp, Homo sapiens
cgggcaggtccaaatcgcactggctcctggactcttttcctatcttcaccacgaactgctgcttgctcgcttgctcctcagtcctagcttcatcaaacactggttcctgggatcctgtctgctgctgtcttcctagattcactgaatccacttctgtgtagcacctgggtcagctgtcaattaatgctagtcctcaggatttaaaaaataatcttaactcaaagtccaatgcaaaaacattaagttggtaattactcttgatcttgaattacttccgttacgaaagtccttcacatttttcaaactaagctactatatttaaggccttccaaattcttctaactcttccaaaagccttctgccttagttttttttaaattacaccagtccttttagtagctttttgatgtgatttttaaccaacttccccttctagcttcaagtattcttctaaattggttctggtctacgtaaacaccctcatcttctcaagctttaccttctaacttctgcaccaccagaaattaaattgatgggcttttaaaataaattggttaccaaaaattt

SEQ ID NO: 62109 - DNA, 536 bp, Homo sapiens; identical to SEQ ID NO: 61976

SEQ ID NO: 62110 - DNA, 429 bp, Homo sapiens; identical to SEQ ID NO: 61977

SEQ ID NO: 62111 - DNA, 509 bp, Homo sapiens; identical to SEQ ID NO: 61978

SEQ ID NO: 62112 - DNA, 379 bp, Homo sapiens; identical to SEQ ID NO: 61980
  misc_feature 14, 16, 20, 21: n = A,T,C or G

SEQ ID NO: 62113 - DNA, 283 bp, Homo sapiens
  misc_feature 1, 80: n = A,T,C or G
nggcgaattggagctccccgcggtggcggccgggggccattgagactgccatggaagacttgaaaggtcacgtagctganacttctggagagaccattcaaggcttctggctcttgacaaagatagaccactggaacaatgagaaggagagaattctactggtcacagacaagactctcttgatctgcaaatacgacttcatcatgctgagttgtgtgcagctgcagcggattcctctgagcgctgtctatcgcatctgcctgggcaagttcaccttccctgg

SEQ ID NO: 62114 - DNA, 528 bp, Homo sapiens
  misc_feature 289, 387, 419, 438, 444, 509: n = A,T,C or G
acatgcatgtgactgtacgtctttgaaaaggcgaccccactttggtatccaggatgaggggaaggggaagaaacctgttaattatgcagtactttttctgtaatttcaagaaggctcagcctacaccgtgtgcaccttaagcaaattcatctacacccactcagacaaggaggaagggaggaggcagaggaggagagtgctccaagctcattacctgtcctttcccatttccatgtttcacctgacctaggagcttcccctgcccccagagaaaggtaggccccaggtnacaaacaaatcaagaaaaattaataaaatggacttttggctttgagcagtccaagggccaaagttcttgagatttagtgttggcatgagatattttangccatctgcactaacttggcaaccagcccctnccctcccccaagtcctgangcacanccccgctgtggcccatccctcagctaaccggaattctctaccgaaacgtctgctcctctacatancccaagttctagggactgc

SEQ ID NO: 62115 - DNA, 498 bp, Homo sapiens
ccttattttttgatgagagagagcacggttaacgcccttaggaagcataagcgcctctccatgccagagcctgacatcagaaatgagtggtttccacatcaacttccgctcccaccgggctgctcagtggccagggaggttgccgaagagtggacagtcagcatcctcggcatcagtgtcctggggccactttccatttggtgcagaaatagctcttgcatttctccacctggcttctgtggaccagggctgggccagctaccggcaagttaagatggagaatcatgtggatttgggagtggaggagaaagggcattcacaggccaggccctggggcataggtgctgttgcccataaaattatttatgggggtcctaaggactgtagtcaatatttgcattgtaaagcagcaacccaggaagggtttcatctaccactttgttatttgtgtttgtttgtatgttatttggtatttatttatgtatttaattttgagac

SEQ ID NO: 62116 - DNA, 319 bp, Homo sapiens; identical to SEQ ID NO: 61982
  misc_feature 180, 188, 249, 272, 273, 275, 283, 284, 289, 291, 301: n = A,T,C or G

SEQ ID NO: 62117 - DNA, 225 bp, Homo sapiens; identical to SEQ ID NO: 61984

SEQ ID NO: 62118 - DNA, 408 bp, Homo sapiens
  misc_feature 103, 104, 145: n = A,T,C or G
cgccccgcgtccgggagtgggttgtcatagcaacagactgatttgcaaaatgtaagcagtctgcagcagtgcaaggagagggaagagcatgtccccaaagtgnnataaatctgtctaaccgcagttgatgcatgagttacatttntacactaacctgcaagacaccgaaaagctaaacagagacttcttttaggtaaaataaacacaagctttacttagggtaagtaaaggcatattttgagctccagtcaactaaactttgattttttttcttagtttattcctttgtctgtccatcataatgggattacgtgtggcaatgggaaaagggagaatacaaaatagaggtgtgcacagcaggctgcggggcttagcccaggctaattgactatatccaaattaagtatg

SEQ ID NO: 62119 - DNA, 419 bp, Homo sapiens; identical to SEQ ID NO: 62052
  misc_feature 46, 48, 53, 137, 152, 156, 159, 166, 167, 171, 174, 204,208, 210, 213, 216, 229, 232, 236, 250, 251, 253, 255, 259,264, 266, 268, 269, 271, 275, 292, 301, 302, 310, 321, 323,329, 342, 348, 350, 365, 375, 381, 383, 398, 399, 400: n = A,T,C or G

SEQ ID NO: 62120 - DNA, 390 bp, Homo sapiens
  misc_feature 294, 296, 324, 352, 360: n = A,T,C or G
cgggcaggtccaaatcgcactggctcctggactcttttcctatcttcaccacgaactgctgcttgctcgcttgctcctcagtcctagcttcatcaaacactggttcctgggatcctgtctgctgctgtcttcctagattcactgaatccacttctgtgtagcacctgggtcaagctgtcaattaatgctagtcctcaggatttaaaaaataatcttaactcaaagtccaatgcaaaaacattaagttggtaattactcttggatcttgaattacttcccgtacccaaaggcctntncatttttttcaaactaagcttcctattnttttaaagggctttccaaaatttttttntaaacttnttttccaaaaagcctttttggctttaagtt

SEQ ID NO: 62121 - DNA, 364 bp, Homo sapiens; identical to SEQ ID NO: 61987
  misc_feature 5, 18, 25, 42, 56, 82, 85, 92, 99, 102, 114, 122, 139, 143,164, 184, 191, 192, 212, 217, 262, 269, 286, 299, 307, 308,332: n = A,T,C or G

SEQ ID NO: 62122 - DNA, 380 bp, Homo sapiens; identical to SEQ ID NO: 61988
  misc_feature 45, 78, 259, 345, 355: n = A,T,C or G

SEQ ID NO: 62123 - DNA, 490 bp, Homo sapiens
tactttacaggatggcatttaatacagatatttcgtatttcccccactgctttttatttgtacagcatcattaaacactaagctcagttaaggagccatcagcaacactgaagagatcagtagtaagaattccattttccctcatcagtgaagacaccacaaattgaaactcagaactatatttctaagcctgcattttcactgatgcataattttcttattaatattaagagacagtttttctatggcatctccaaaactgcatgacatcactagtcttacttttgcttaattttatgagaaggtattcttcatttttaattgcttttgggattactccacatcttttgtttaatttcttgactaatcagatttttaatagagtgaagttaaattgtgggtcataaaaagcattggattgacatatggtttgccagcctaagggtttacaggcattgtccaaacattttttgagaactatatttataag

SEQ ID NO: 62124 - DNA, 593 bp, Homo sapiens
  misc_feature 15, 16, 18, 160, 165, 318, 329, 359, 393, 403, 412, 415,455, 485, 489, 498, 526, 540, 557, 564, 565: n = A,T,C or G
ttggagctccaccgnngnggcggccgaggtacactcgtcttgaataggctaaaggttggtcttcaggttgtggcagtcaaggctccagggtttggtgacaatagaaagaaccagcttaaagatatggctattgctactggtggtgcagtgtttggagaanagggnattgacccctgaatcttggaaggaccgttcagccctcatgacttaaggaaaaagtttggagagggtcatttgtgacccaaagacgattgccatgctccttaaaaagggaaaaaggtgacaaaggctcaaaattgaaaaaacgtattttcaagnaaaatcaattngagcaagtttagatgtcacaaactaagtgnaatattgaaaaagggaaaaaacttgaaatgaacnggctttgcanaaaactttnaanaatgggaagtgggcctggtggcttgaagggtttgggtggngaccaaagttgaattgtttgaaagttgaantganaaaaggaanaggaccaggagttcaccaggatggcccntttaaatggcctancaaagaagcttgcttgnttggaannaaaggcctttggtttttgggggaggggg

SEQ ID NO: 62125 - DNA, 380 bp, Homo sapiens; identical to SEQ ID NO: 61992
  misc_feature 251, 298: n = A,T,C or G

SEQ ID NO: 62126 - DNA, 576 bp, Homo sapiens
  misc_feature 6, 21, 327, 331, 403, 489, 520, 545, 568: n = A,T,C or G
tccganccccgcgtccgtgtngttccacctgggacgcgagcctaggggaggctgaggctggaaggggcaggtggtccccagcccaggaacagaacccaggggtcctaattccaagctcagtatgccccctgcctgacatggccacacgtgcctttcaggcgttgcctgagcctcacctagcctggcacaggaagccttcctcaggacctgggcgggaggctcccagaaggcagtgtccatctctaacgcagcttagagaggagcactcacaagatgaagtcctcagagctctgagaggatgatgatgaaccctctcccagcctcctnctgncaagcttggtcttctgtccaccctaccctcacctcaccaccccccttcgccccaagcgtaagcagctggcantggtgacaaaagccgtgcccagctttgggggcatttagaagccaaaagttggcattttacttgggccggctcttggcttaagaagnaagtgcacttaatcccttaagaggatgtgtngcaaggaagatgaagaaggaagggnaagcttagggaaggaaaatcccncgggggtt

SEQ ID NO: 62127 - DNA, 515 bp, Homo sapiens; identical to SEQ ID NO: 61995

SEQ ID NO: 62128 - DNA, 197 bp, Homo sapiens; identical to SEQ ID NO: 61996
  misc_feature 6, 31, 41, 54, 55, 58, 59, 70, 73, 78, 115, 125, 148, 177,181, 186, 190: n = A,T,C or G

SEQ ID NO: 62129 - DNA, 501 bp, Homo sapiens; identical to SEQ ID NO: 61994
  misc_feature 490: n = A,T,C or G

SEQ ID NO: 62130 - DNA, 372 bp, Homo sapiens
  misc_feature 14, 15, 66, 74, 79, 93, 106, 126, 134, 162, 179, 182, 189,193, 204, 215, 216, 225, 259, 260, 267, 270, 293, 310, 315,354: n = A,T,C or G
ctctttgacagctnncgagccaattattctgaacacacattcgactcagtcagttttcctataatnaaaatgtntggcntaatagaatcactntctggcctgtgtnccctgagatctaagcacgtnttttcagnctgcagtaaccctaactatcattactgncatttcgatccaatttnttntcccatnattnggctgacaaanagaaaaacatnntatcctaanttaaaatctttcaggtaaatgctgccttatatcnnatacctnttncacacaaagcagataataaagcnttttccattgttaattnagtanctcaatgtggtattgaaattaaggaactgagacttctgnatccaccttatctatcag

SEQ ID NO: 62131 - DNA, 483 bp, Homo sapiens
ccacgcgtccggatcacgccactgcactccagcctgggcaacagaaaaaaaaaaaaaaaagataggtgctgttcagtttgatcacttggtaagatagggcctgtcttgtttctcccctgtgaagtttccatccgtaattgataaatatcttatggcgaaatactttcacactaggcaaatgtgctgcttttcctcctcccactccgattttggcatccatcactggaccttgtctgcaccagttattactctgtcacttgtctaatgttgattttctgtgtcccttattccttcaccatttattaattggaattcttcaataaggaagaactgtccctagccctcttccattcacttgttcattcaatgatttctttatatcacgatgagttcgtgggtatttattttattctatgggctgtagtcactactttcattgtttatttcattgctcgaatcgttcaggctttggcccttgaaaac

SEQ ID NO: 62132 - DNA, 355 bp, Homo sapiens
  misc_feature 252, 259, 294: n = A,T,C or G
attggagctccccgcggtggcggccgcccgggcaggtattcggtgcttcccaacacctccttattggaaaacagccaaggagatggtggctaactggaggcatcacccagcagtggtggagcagtggagcaaggtcatttgtgcactcacttccagattgctacgctttacatatggtccttcatttcctgcatttaaagttcccgatgaagatgccagtctgatccctccagaaatggataatgagtgtgntgcacangacatggtttcgctttttacacatgttaagtaatnctgtggatttgagtaacccagctattataagctctactcccaaatttcaggaacagttctt

SEQ ID NO: 62133 - DNA, 391 bp, Homo sapiens; identical to SEQ ID NO: 62000

SEQ ID NO: 62134 - DNA, 659 bp, Homo sapiens; identical to SEQ ID NO: 62002
  misc_feature 29, 31, 51, 105, 111, 281, 341, 367, 502: n = A,T,C or G

SEQ ID NO: 62135 - DNA, 352 bp, Homo sapiens
  misc_feature 8, 20, 76, 78, 81, 82, 173, 185, 205, 215, 217, 219, 230,235: n = A,T,C or G
ccccgctnagaacaacattnttaaaacacttgataacttgtatctcacattctaccatgtgacaattcaatgactncnttnntcccttttctctattccctcttaccacggctgcgatactgtgtcttagacatctgctttttggctgcttcattccccaggaggctacattntgcatttttcancccttggaagcagttctgtncctttgaagngntncttcattgttncttangacctagacaaaactaatacttcccattcactttgctaattttccatctttaatttatatactttattaagtatattttaaatagagacgagattaaaaaatatttacaactattct

SEQ ID NO: 62136 - DNA, 416 bp, Homo sapiens; identical to SEQ ID NO: 62003
  misc_feature 5, 101, 186, 208, 210, 211, 218, 219, 226, 235, 239, 259,280, 291, 298, 301, 305, 306, 308, 320, 321, 327, 333, 334,336, 352, 358, 359, 367, 368, 379, 388, 389, 391, 403, 408: n = A,T,C or G

SEQ ID NO: 62137 - DNA, 346 bp, Homo sapiens; identical to SEQ ID NO: 62040
  misc_feature 297, 308, 321, 328: n = A,T,C or G

SEQ ID NO: 62138 - DNA, 333 bp, Homo sapiens; identical to SEQ ID NO: 62004
  misc_feature 48, 107, 112, 149, 165, 198, 210, 226, 241, 279, 312, 331,333: n = A,T,C or G

SEQ ID NO: 62139 - DNA, 492 bp, Homo sapiens
ccgcggtggcggccgcccgggcaggtacattggcacgtcacgatgtcttgagtttcattcactaggtggcagcctgcatcgttccactgcaaatgactgaaatcccaaaacacacaatgaggctggctcaggtttgactctatcttggaaaaaaataggaaaacttcatttatggaatagttttgaataaccgtggatatcacaggtccattgacctgagcatttccatttttggaaacgggtagaatgttccccagagtcaacgaggccatgctgataatagtttctggaagggatctctggaattggtctgacccaattaacacacggcctctgatgggaatagatgtattttggggacacattttaatctgatagctgtaaccccttttgagttggcttttgttcactggaatccctttccagtcaatgaatttccgagaaaaattcagaggaagagctgtcggaggcaccagagtgctgatgttttct

SEQ ID NO: 62140 - DNA, 493 bp, Homo sapiens; identical to SEQ ID NO: 62005

SEQ ID NO: 62141 - DNA, 434 bp, Homo sapiens
  misc_feature 2, 181: n = A,T,C or G
tnaccctactaaagggaacaaaagctgggtaccgggccccccctcgaggtcgacggtatcgataatgcttgatatcgaattcctgcagcccgggggatccactagttctagagcggccgaggtcggcctaggtcaacaaccgactaatcaccacccaacaatgactaatcaaactaacctnaaaacaaatgataaccatacacaacactaaaggacgaacctgatctcttatactagtatccttaatcatttttattgccacaactaacctcctcggactcctgcctcactcatttacaccaaccacccaactatctataaacctagccatggccatccccttatgagcgggcgcagtgattataggctttcgctctaagattaaaaatgccctaacccacttcttaccacaagggacacctacaccccttatc

SEQ ID NO: 62142 - DNA, 212 bp, Homo sapiens; identical to SEQ ID NO: 62009

SEQ ID NO: 62143 - DNA, 328 bp, Homo sapiens; identical to SEQ ID NO: 62007
  misc_feature 5, 246, 310, 325: n = A,T,C or G

SEQ ID NO: 62144 - DNA, 445 bp, Homo sapiens
accaagcattggacacacaaaaatacaggcagcttcttccctcaaggaggtcacaggtgggtgtgtccatagcaaagctgggaggaagttgtatgaggagcctgaagacaatggggagctaggggaaagttctgagtagaaaggaacatgtggacaaaggtttgaaatgatgaagactgattaggaagttcatattatgaagcataattcaagctttctctacgatgttcaaatcccatctctcctacttactagataggtgacattgggcaagttacttatctcctctgctcctgtttatttgtttcaaaaacagggacctctctcacagtgtgattatgaagactggacaagaaaatggagttttggttttgaatgcgttaggggtctttgccttaggcgtgtagtggagacatggtttacacaatttgctgcaccttctgga

SEQ ID NO: 62145 - DNA, 246 bp, Homo sapiens
  misc_feature 112, 116, 149, 243: n = A,T,C or G
catggggaatcaaataaggtacatttaattttcatctcagatgtgagaaaactggaacttagaaaagcaaagtaaatgctcatggtcacactactgttaagataaatctggnattnaaatgtaggtctctctgattataaaactcatgntctttctcttgcaggatgctgccagtgaccccagagccttttgttttcctccaatattctcagtgctttaaatatttaatgatccttcaacgtntct

SEQ ID NO: 62146 - DNA, 432 bp, Homo sapiens
atgtgtggcacaaagtaaaaatttctccatgcacttcagatgatccatagtttccctaaacactgtggacttgcagagaaggaagtgtgggaacagcatcaacatactcttacatacagggcctgcaagaatctcacgtggtaggaaaattcatttttcaaccactacacctgttctatgaatacagcaattggttatgtgtagagaagcatagcatcatatgtatttttacatactattgccattactaggttttattagggacagaaccttggtagaataaaagcacatttagaatataatgctactttcatcatcatttgttatattgtcttaatattcttcacacccaagacttgaatatatatatatatttacatggaagtaaagtttacatggaacaatgccaaggaaggggttttcaggcaacaa

SEQ ID NO: 62147 - DNA, 541 bp, Homo sapiens; identical to SEQ ID NO: 62012

SEQ ID NO: 62148 - DNA, 315 bp, Homo sapiens; identical to SEQ ID NO: 62015

SEQ ID NO: 62149 - DNA, 356 bp, Homo sapiens
gacaggatgttcttccatacaaagaagtgctcacagtctttctggccggccagtaagtgaatgatttcaggcctggtgggcaatacttgtgtccatgcgtaacacagcccaaccacagtagtaggcagctgaatgtaataccgaactccactcattgaactgtacttgaacattttacccactgcatggggggaagattggatgcatctgtccttacacacggttcaggcatatgaacgcctagctggctgacaagaggatattgagatacgatttggattggatacgcataattgaacaggccaggaaagtcacccgaaggctaaacgcctgtactgccataacggtatatccat

SEQ ID NO: 62150 - DNA, 392 bp, Homo sapiens; identical to SEQ ID NO: 62017
  misc_feature 34, 38, 48, 55, 60, 65, 73, 105, 123, 138, 149, 150, 151,157, 160, 161, 172, 191, 198, 238, 267, 284, 285, 288, 293,294, 302, 320, 322, 323, 327, 331, 332, 342, 345: n = A,T,C or G

SEQ ID NO: 62151 - DNA, 621 bp, Homo sapiens; identical to SEQ ID NO: 62018
  misc_feature 14, 23, 44, 47, 49, 77, 91, 125, 200, 233, 235, 277, 280,296, 307, 310, 324, 342, 349, 359, 361, 371, 373, 392, 406,415, 448, 452, 478, 505, 525, 531, 554, 609: n = A,T,C or G

SEQ ID NO: 62152 - DNA, 431 bp, Homo sapiens
  misc_feature 98: n = A,T,C or G
ccgtaagatctccagcatggagaagagtctggagggaaacaccaaactcataacagtcttactgcaggcaagtgggataaaggcccagactccatggnggaagttaaagggcatttccaagttaaggctaagacttgcttttctaactaagagaatgtgctcatgcattgcttgtgtagtagaaactagtttttagaaaagaaagcaaacttaagaaacactgactcctgtggagatgacttggcaccactctcctttcacagagcagagtctgaatagtcttcagagataggcctgtgggccagattgccatcccctatggaccagaagccaaggatctctctagtgatggtcagagggcccaaatggcagggatacccagtgatgtcaggaggaataagtgcagacagaaggtgctaagcagacaattc

SEQ ID NO: 62153 - DNA, 473 bp, Homo sapiens; identical to SEQ ID NO: 62020

SEQ ID NO: 62154 - DNA, 487 bp, Homo sapiens; identical to SEQ ID NO: 62023

SEQ ID NO: 62155 - DNA, 548 bp, Homo sapiens
  misc_feature 404, 483, 515, 536, 540: n = A,T,C or G
cgcggtggcggccgcccgggcaggtacgttaaaatacatatcaaaaacaccatgcaggcaccagagtcctgaaattgtcagagaatttctcacagcattgaaaagccacaagttgaccaaagctgagaagctccagctgctgaaccaccggcctgtgactgctgtggagatccagctgatggtggaagagagtgaagagcggctcacggaggagcagattgaagctcttctccacaccgtcaccagcattctgcctgcagagccagaggctgagcagaagaagaatacaaacagcaatgtggcaatggacgaagaggacccagcatagaagagcacagctggccccggcgtttcatgaagtcagaaggcctggcaagccatttcctggacgttgagaggattgnttatttgatttttatcctcatcccagcaggcctggctttgtggttagttgggtacctcggcccgcttctagaactagtnggatcccccgggcttgcaggaatttcgatatnaagcttatcgatacccgtcgncctngagggggg

SEQ ID NO: 62156 - DNA, 303 bp, Homo sapiens
cgaccacgcgtccgcaagcagctgaatcctgctggtgaatctgaaatagctgaaaaaatccataccaccagaaattcatggttttccacctctgctaagctagtaggcaaccagtaaattattttgtctgtcatcactactttcccccatttgactattcttccaataattattctaaattacttagcctttagcccccaatctctagactctcttctttaagcagacaactttgcctattacttgaatgaaaaaattgagccagtcattcttgagctccctcagtttgtggcctcccacctg

SEQ ID NO: 62157 - DNA, 570 bp, Homo sapiens
  misc_feature 3: n = A,T,C or G
atnaccctactaaagggaacaaaagctgggtaccgggccccccctcgaggtcgacggtatcgataacgcttgatatcgaattcctgcagcccgggggatccactagttctagagcggccgaggtaccgcaagggaaagatgaaaaattataaccaagcataatatagcaaggactaacccctataccttctgcataatgaattaactagaaataactttgcaaggagagccaaagctaagacccccgaaaccagacgagctacctaagaacagctaaaagagcacacccgtctatgtagcaaaatagtgggaagatttataggtagaggcgacaaacctaccgagcctggtgatagctggttgtccaagatagaatcttagttcaactttaaatttgcccacagaaccctctaaatccccttgtaaatttaactgttagtccaaagaggaacagctctttggacactaggaaaaaaccttgtagaggagaggaaaaaatttaacacccatagtaggcctaaaagcagccaccaattaaaaagcgttcaagctcaacacccactcctaaaa

SEQ ID NO: 62158 - DNA, 380 bp, Homo sapiens
ccacgcgtccgcggacgcgtgggcggacgcgtgggagcgccccatcatttgacggtgaagcaggactcaggctgtgtgtcctggagctacttctcaccaactgtggtcagtgcagggggaacgaggaggtcttttgggggcctggcgaggggaagggctgctgcagtctagggagagggggtgcagcctgggggatgttggtggacatggatgtggaggtggaaggaggaaggacgttgcgtggagtggtgggaaggaggccgggagccgtgtgcgagagcaggtggaaagccttgaggggcaggaccaggatgcagctggcttgtagaagagctcaggagtgagcctggcactccagagggcgcggcgggtggggaggc

SEQ ID NO: 62159 - DNA, 348 bp, Homo sapiens; identical to SEQ ID NO: 62025

SEQ ID NO: 62160 - DNA, 642 bp, Homo sapiens
  misc_feature 247, 275, 307, 351, 362, 371, 386, 422, 435, 447, 514, 524,551, 603, 614: n = A,T,C or G
aggtacaaacttagaagaaaattggaagatagaaacaagatagaaaatgaaaatattgtcaagagtttcagatagaaaaggaaaaacaagctaagacaagtattggagaagtatagaagatagaaaaatataaagccaaaaattggataaaatagcactgaaaaaatgaggaaattattggtaaccaatttattttaaaagcccatcaatttaatttctggtggtgcagaagttagaaggtaaaagncttgagaaagatgaggggtgtttaccgntaggaccaggaaccaatttaggaagaaatacnttgaaggctaggaagggggaaggtttgggtttaaaaaaattcancattcaaaaanaggcttacntaaaaaagggacctnggtggtaatttttaaaaaaaaaaacttaaagggcangaagggcttttgngaaaggaggttnagaaaggaaatttggggaaagggccctttaaaaatattaggtagctttaagttttgaaaaaaatgtngaaagggacnttttcgtaaaccgggaaggttaaattnaaaggaatcaaagaagtaattttacccaaactttaatggttttttgccattnggaccttttgnagtttaaagaatttattttttttaaaat

SEQ ID NO: 62161 - DNA, 574 bp, Homo sapiens
aggtacaaacttagaagaaaattggaagatagaaacaagatagaaaatgaaaatattgtcaagagtttcagatagaaaatgaaaaacaagctaagacaagtattggagaagtatagaagatagaaaaatataaagccaaaaattggataaaatagcactgaaaaaatgaggaaattattggtaaccaatttattttaaaagcccatcaatttaatttctggtggtgcagaagttagaaggtaaagcttgagaagatgagggtgtttacgtagaccagaaccaatttagaagaatacttgaagctagaaggggaagttggttaaaaatcacatcaaaaagctactaaaaggactggtgtaatttaaaaaaaactaaggcagaaggcttttggaagagttagaagaatttggaaggccttaaatatagtagcttagtttgaaaaatgtgaaggactttcgtaacggaagtaattcaagatcaagagtaattaccaacttaatgtttttgcattggactttgagttaagattattttttaaatcctgaggactagccattaattgacagctgaccca

SEQ ID NO: 62162 - DNA, 511 bp, Homo sapiens
tttcctgtttgagatggtttatatgagcttgtattttctatgttacaacaaatgactgcagagaggtagtttttctttccctaatgaccattaatctatgcaagattttgataaagccataaatgatgatattgtttcctttttttcaggcatgatttttttcaatcacctgggaatatatttaattgtttatatactgctgagagtatagcttcattattgaggtctctgttctaaagattattatatcacatagaatctaattgccgacctgattctgtactttcctaataaatttatgtgcacatttgatggtgtagcatggacagaagttattaagtcattgattgttgatggatgtgaagaaccttcacgaataaaagtattaaatacacttaacctatgctcgtgcatgttatgaaggaaagtggagaccagccttttctctctctgtttctgcccagcatgcctttgattttcaaattggcgtttttgcacatgccagtgcact

SEQ ID NO: 62163 - DNA, 895 bp, Homo sapiens; identical to SEQ ID NO: 62030
  misc_feature 35, 38, 54, 58, 69, 76, 78, 91, 106, 116, 120, 122, 135,157, 169, 189, 200, 221, 233, 239, 241, 253, 255, 257, 264,266, 274, 276, 283, 287, 295, 301, 307, 334, 339, 351, 358,365, 369, 383, 387, 406, 414, 425, 427, 440, 443, 466: n = A,T,C or G
  misc_feature 470, 487, 508, 511, 564, 567, 612, 614, 617, 622, 625, 627,643, 669, 690, 691, 694, 709, 741, 755, 756, 765, 772, 778,791, 814, 818, 850, 853, 861, 894: n = A,T,C or G

SEQ ID NO: 62164 - DNA, 341 bp, Homo sapiens
  misc_feature 142, 188, 248: n = A,T,C or G
aggtacattttctctgctgcaacccaggatttgggcttatgatcaggaggaatggtgattccatattcccagcctttctcatccaccactcgatttatgtcataagaccatgcatcatcttcccattcccaacctgggaggnacaagtcaactcgctgggtgatgctgctttatcgccgttcgcatcncgtgtagggtgttcctcggccgccacccgccggtgggaagctcccaatttcgccctatantggaggtcggtatttacgcgcggctcacctggccgtcgttttaccaacgtcgtgactgggggaaaaaccctggcggtttacccaaccttaaat

SEQ ID NO: 62165 - DNA, 609 bp, Homo sapiens; identical to SEQ ID NO: 62032
  misc_feature 1, 3, 34, 37, 38, 41, 43, 51, 57, 60, 73, 77, 79, 87, 105,106, 111, 114, 118, 121, 132, 140, 148, 158, 162, 168, 186,197, 204, 218, 229, 232, 246, 254, 275, 288, 293, 307, 312,316, 323, 334, 339, 345, 363, 367, 375, 389, 400, 429: n = A,T,C or G
  misc_feature 438, 472, 495, 511, 540, 542, 569, 581, 590, 592, 594, 595,608: n = A,T,C or G

SEQ ID NO: 62166 - DNA, 608 bp, Homo sapiens
  misc_feature 3, 36, 37, 40, 113, 117, 124, 163, 209, 224, 228, 243, 279,294, 300, 305, 357, 371, 396, 414, 415, 472, 486, 496, 499,536, 585: n = A,T,C or G
gcnggccgcccgggcaggtacgcgggaatgggcacnntgnagcgcaagtaggtctacaagacgctacttcccctatcatagaagagcttatcacctttcatgatcacgccctngggnatcattntccttatctgcttcctagtcctggtatgcccttttcctnaaccactcacaaaccaaaaacttaactaaataacttaacaatcctnagaacgcctcaaggnaaantaagaaaacccgtcntgaaacttattcctgccccgcccatcatcccttagntccctcaattctggnccctcnccaancccctaccgccaatccctttttacaataaaacaggaccgaagggtccaaacngaatcccctccccnttacccattcaaaaaatcaaaattnggcccacccaaattggannaccttgaaacccctaaccgaagttacccttcgggcccgcttcttaagaaactaaggngggaatcccccccnggggcctggnaanggaaatttcggataatcaaagccttaattccgaatancccggtccgaacccttcggagggggggggggcccccggggtacccccangctttttgggtttccctttttaa

SEQ ID NO: 62167 - DNA, 314 bp, Homo sapiens
acctgtgtggaaaagaatgcttgcaaagcttgtcaccctcacgagaattcctgtgacagacatttgcctttgacagtgaaaacagatattaaagtgaaaggagaagaaaccgaagagcatcagaggggacgactgggttacttaactgttggggagcaatctgaggagttggttaccagagaaactggcgatggcgatcccgtgagcaacatctctcagacccattttaaatgccgggggatacttaatcatgctgaaaaacagcagagccctgaggttttggactaacatgttgcagaaagaagagaaatata

SEQ ID NO: 62168 - DNA, 288 bp, Homo sapiens
cgacccacgcgtccgggtaaaaaaacagcttttaataaagctgtctactttttctagttggcttttacttcaactagttagaatgaagtgtattgttttgttgtaggaacttctgaaggccataaaaagtctaacatacaaatatatggacagttttctgcagagtaccatgaagatccagtcttagtatacacatttcaagaactgatgagctgctctttaatattaactgctgatttttcaggttaggatggagtgatctcattgttcccattcttgcctttactt

SEQ ID NO: 62169 - DNA, 147 bp, Homo sapiens; identical to SEQ ID NO: 62036
  misc_feature 8, 9, 11, 50, 83: n = A,T,C or G

SEQ ID NO: 62170 - DNA, 577 bp, Homo sapiens
  misc_feature 53, 58, 59, 143, 173, 197, 242, 303, 432, 491, 504, 514, 537: n = A,T,C or G
gtcgaccccgcgtccgcttagggaactgcaatattataagtatagtaatgacngcagnngagaaccataatgatggcctccccggcaaagaagaaccaacccgtgttacgcctgaggttgcaattttttgaatttttgcagtnagaccctggcgatgaccttgagcagtaggngataaattccacatgcttagcgtnccagtaatggaacactaggcataaatgggttattaaagtatccanaattaacatgcttagctgtgacattggaaaggcaatgtgtttgctgtggcacacatactantaaataatgactggtccgaatttggttttcgtttgtctattaaagtcaatttactaaggcagggagggcccagagctgtgctgtccagttcaatagccatgcgtgactgctaaggacttccaaagtggntagtccaatgtcaggtatgctgcaagtgtcaaacacacactggatttcaaagactaaanccaaaaaaatgtnaaatcatctnaatattttggttatactcggttnaagaaaataaaattatttttgccttttatgtttttaaaag

SEQ ID NO: 62171 - DNA, 439 bp, Homo sapiens
ataaagcacaaagacttgggaattagatgttttgaccctctggcctcctagttctgtgacttagggcaagttgtttcttcttttttctttccctctccctccttcacaacatttttaggtgggtactcttattatccttattttacaagtttcattaggcacagaaaggctaagagttacagttgtaagtgatggatttgtgatttggacttaggcaattcaatttcatgatctgtgattgctttattaggagtctgaactgtattcttgaagtcccagaagatagttaactattctggatttttttaaagagcttttagaaatgtaagtacttgttttatgggtaactggatcgaatcccattttacaaaatgaagatttttctttttttcttaaacataatgaatctttgaaataccaatttgaaaacttttttact

SEQ ID NO: 62172 - DNA, 432 bp, Homo sapiens; identical to SEQ ID NO: 62074

SEQ ID NO: 62173 - DNA, 567 bp, Homo sapiens; identical to SEQ ID NO: 62108

SEQ ID NO: 62174 - DNA, 429 bp, Homo sapiens; identical to SEQ ID NO: 61977

SEQ ID NO: 62175 - DNA, 509 bp, Homo sapiens; identical to SEQ ID NO: 61978

SEQ ID NO: 62176 - DNA, 360 bp, Homo sapiens; identical to SEQ ID NO: 61979
  misc_feature 6, 15: n = A,T,C or G

SEQ ID NO: 62177 - DNA, 379 bp, Homo sapiens; identical to SEQ ID NO: 61980
  misc_feature 14, 16, 20, 21: n = A,T,C or G

SEQ ID NO: 62178 - DNA, 283 bp, Homo sapiens; identical to SEQ ID NO: 62113
  misc_feature 1, 80: n = A,T,C or G

SEQ ID NO: 62179 - DNA, 528 bp, Homo sapiens; identical to SEQ ID NO: 62114
  misc_feature 289, 387, 419, 438, 444, 509: n = A,T,C or G

SEQ ID NO: 62180 - DNA, 319 bp, Homo sapiens; identical to SEQ ID NO: 61982
  misc_feature 180, 188, 249, 272, 273, 275, 283, 284, 289, 291, 301: n = A,T,C or G

SEQ ID NO: 62181 - DNA, 225 bp, Homo sapiens; identical to SEQ ID NO: 61984

SEQ ID NO: 62182 - DNA, 390 bp, Homo sapiens; identical to SEQ ID NO: 62120
  misc_feature 294, 296, 324, 352, 360: n = A,T,C or G

SEQ ID NO: 62183 - DNA, 321 bp, Homo sapiens; identical to SEQ ID NO: 62058
  misc_feature 5, 106: n = A,T,C or G

SEQ ID NO: 62184 - DNA, 380 bp, Homo sapiens; identical to SEQ ID NO: 61988
  misc_feature 45, 78, 259, 345, 355: n = A,T,C or G

SEQ ID NO: 62185 - DNA, 531 bp, Homo sapiens; identical to SEQ ID NO: 61991

SEQ ID NO: 62186 - DNA, 501 bp, Homo sapiens; identical to SEQ ID NO: 61994
  misc_feature 490: n = A,T,C or G

SEQ ID NO: 62187 - DNA, 515 bp, Homo sapiens; identical to SEQ ID NO: 61995

SEQ ID NO: 62188 - DNA, 580 bp, Homo sapiens; identical to SEQ ID NO: 62087

SEQ ID NO: 62189 - DNA, 197 bp, Homo sapiens; identical to SEQ ID NO: 61996
  misc_feature 6, 31, 41, 54, 55, 58, 59, 70, 73, 78, 115, 125, 148, 177,181, 186, 190: n = A,T,C or G

SEQ ID NO: 62190 - DNA, 372 bp, Homo sapiens; identical to SEQ ID NO: 62130
  misc_feature 14, 15, 66, 74, 79, 93, 106, 126, 134, 162, 179, 182, 189,193, 204, 215, 216, 225, 259, 260, 267, 270, 293, 310, 315,354: n = A,T,C or G

SEQ ID NO: 62191 - DNA, 483 bp, Homo sapiens; identical to SEQ ID NO: 62131

SEQ ID NO: 62192 - DNA, 355 bp, Homo sapiens; identical to SEQ ID NO: 62132
  misc_feature 252, 259, 294: n = A,T,C or G

SEQ ID NO: 62193 - DNA, 391 bp, Homo sapiens; identical to SEQ ID NO: 62000

SEQ ID NO: 62194 - DNA, 352 bp, Homo sapiens; identical to SEQ ID NO: 62135
  misc_feature 8, 20, 76, 78, 81, 82, 173, 185, 205, 215, 217, 219, 230,235: n = A,T,C or G

SEQ ID NO: 62195 - DNA, 416 bp, Homo sapiens; identical to SEQ ID NO: 62003
  misc_feature 5, 101, 186, 208, 210, 211, 218, 219, 226, 235, 239, 259,280, 291, 298, 301, 305, 306, 308, 320, 321, 327, 333, 334,336, 352, 358, 359, 367, 368, 379, 388, 389, 391, 403, 408: n = A,T,C or G

SEQ ID NO: 62196 - DNA, 346 bp, Homo sapiens; identical to SEQ ID NO: 62040
  misc_feature 297, 308, 321, 328: n = A,T,C or G

SEQ ID NO: 62197 - DNA, 333 bp, Homo sapiens; identical to SEQ ID NO: 62004
  misc_feature 48, 107, 112, 149, 165, 198, 210, 226, 241, 279, 312, 331,333: n = A,T,C or G

SEQ ID NO: 62198 - DNA, 529 bp, Homo sapiens
cgacccacgcgtccggaagaattaacaaaagctacagccctaaccatcatggataagaaactgtggtgggcagaccaaaacttagcccagctaggaacctgcagcaaaagagacggaagaaaccccaccatcctacggaataagacttctggggtagttcatatgaaagtctatgataaagaagcacagcaaggcagcaattcctgccaactaaacaatggtggatgctctcaactttgtttaccaacatctgaaactacaaggacttgtatgtgtacagtgggatattatctccaaaagaaccgtatgtcatgtcaagggatagaatcatttcttatgtactctgttcatgaaggaatcaggggaatacctcttgaaccaagtgacaaaatggatgctttgatgcctatatcaggaacttcatttgccgtgggaatagatttccatgcataaaatgataccatttactggacagacatgggcttcaataaaattagcagagctaaaagagatcagacttggaaagaag

SEQ ID NO: 62199 - DNA, 492 bp, Homo sapiens; identical to SEQ ID NO: 62139

SEQ ID NO: 62200 - DNA, 493 bp, Homo sapiens; identical to SEQ ID NO: 62005

SEQ ID NO: 62201 - DNA, 434 bp, Homo sapiens; identical to SEQ ID NO: 62141
  misc_feature 2, 181: n = A,T,C or G

SEQ ID NO: 62202 - DNA, 328 bp, Homo sapiens; identical to SEQ ID NO: 62007
  misc_feature 5, 246, 310, 325: n = A,T,C or G

SEQ ID NO: 62203 - DNA, 212 bp, Homo sapiens; identical to SEQ ID NO: 62009

SEQ ID NO: 62204 - DNA, 705 bp, Homo sapiens
  misc_feature 4: n = A,T,C or G
aatncgactcactatagggcgaattggagctccaccgcggtggcggccgttaaacatgtgtcactgggcaggcggtgcctctaatactggtgatgctagaggtgatgtttttggtaaacaggcggggtaagatttgccgagttccttttactttttttaacctttccttatgagcatgcctgtgttgggttgacagtgagggtaataatgacttgttggttgattgtagatattgggctgttaattgtcagttcagtgttttaatctgacgcaggcttatgcggaggagaatgttttcatgttacttatactaacattagttcttctatagggtgatagattggtccaattgggacctcggccgctctagaactagtggatcccccgggctgcaggaattcgatatcaagcttatcgataccgtcgacctcgagggggggcccggtacccagcttttgttccctttagtgagggttaattgcgcgcttggcgtaatcatggtcatagctgtttcctgtgtgaaattgttatccgctcacaattccacacaacatacgagccgggagcataaagtgtaaagcctggggtgcctaatgagtgagctaactcacattaattgcgttgcgctcactgcccgctttccagtcgggaaacctgtcgtgccagctgcattaatgaatcggccaacgcgcggggagaggcggt

SEQ ID NO: 62205 - DNA, 445 bp, Homo sapiens; identical to SEQ ID NO: 62144

SEQ ID NO: 62206 - DNA, 474 bp, Homo sapiens
actcaggccttactgggatttcctttaagacctctgggaggaagtgtcagtagctgggcaggccttcttggcaagcattcctccctgggttgtggcgggggctcccggcctgctgtgtggcagctgcaggctcctggggacctgaaggaaaagcttaaccgttctcccttcccttgcttggcacttagagcactagttccattccagacataccgattatcttgcctacgtggcatagaggcctaggagcctccctgggaggaagaggcaggccaaggtcttgcctggctgcttttagggggaaagatgtagggaggaagctgccttatgcttggatctgcagcctttgcctggacctgtggagcctatttggccagggtgagggagacaaaaattaaaacccatcgtattcagctaatccttttcttgcctttgaacattgccggggagtctggaaaaaaaaaaaaaaaaaaa

SEQ ID NO: 62207 - DNA, 246 bp, Homo sapiens; identical to SEQ ID NO: 62145
  misc_feature 112, 116, 149, 243: n = A,T,C or G

SEQ ID NO: 62208 - DNA, 367 bp, Homo sapiens; identical to SEQ ID NO: 62051

SEQ ID NO: 62209 - DNA, 432 bp, Homo sapiens; identical to SEQ ID NO: 62146

SEQ ID NO: 62210 - DNA, 541 bp, Homo sapiens; identical to SEQ ID NO: 62012

SEQ ID NO: 62211 - DNA, 546 bp, Homo sapiens; identical to SEQ ID NO: 62086
  misc_feature 97, 164, 171, 178, 398, 427, 494, 529: n = A,T,C or G

SEQ ID NO: 62212 - DNA, 531 bp, Homo sapiens
agccttcactgctgaagaatccgattttgtgtatctccccatctcaaaaaaagaaagaaagaaaacagagtgtttggatgaattggtgtggagggtgggagtcgagaatagatgtcaggagttaatataaactggcaggttgtcagtaaaggtccctcagagtaagtggcttctgagctgagcccggaatgcaaagaaaggagccagacatgtgaggagctgagatgaccctcgtctaggcggagggaacatcccatgtgaaagcctaagcagggaataagcatgctcagtctaaggatggggtgggagtggggggccggagccagtatggcagcagtgcagtgaattagtggggagtggtaggaagtgaggttggcaatagagggagcacgtgacacgggctcttgcaggctgtgagacctagcttatgttgtgtttgaagcatgagagtaacaggagtgacttaacttttttttttttttaaatccttgccactgtgtggggaatggattgggttatagaggagtagaa

SEQ ID NO: 62213 - DNA, 315 bp, Homo sapiens; identical to SEQ ID NO: 62015

SEQ ID NO: 62214 - DNA, 490 bp, Homo sapiens; identical to SEQ ID NO: 62101

SEQ ID NO: 62215 - DNA, 356 bp, Homo sapiens; identical to SEQ ID NO: 62149

SEQ ID NO: 62216 - DNA, 336 bp, Homo sapiens
  misc_feature 2, 71, 121, 174, 257: n = A,T,C or G
anaagaagaaattaatagtatcagatgctctgtttagttgattttcagcagttgagcctttcatcttccanagcttttcttgccagagaatgtgaccttttaaaactgaaaagtaactgtnatgtactttcagaagtagcattttattcccgtcactgaaaccttgaaaacatncaaggtttaagctgagtagttcacagatgggttggcagatcccatataaacacatgattcaccctggatcagaagtaactgcngaagccaaaattacatgcattggtggcccattggaccgtgaagctgtgggaaaatgaagggggaaggaagtaacctgaa

SEQ ID NO: 62217 - DNA, 99 bp, Homo sapiens
ccctttcttcttggctccctttttgccgcctttcgtaaggcgcttgttcttgccaaccgccatggtgctggtcagagagccaaaaggccccgcgtacct

SEQ ID NO: 62218 - DNA, 567 bp, Homo sapiens; identical to SEQ ID NO: 62019

SEQ ID NO: 62219 - DNA, 473 bp, Homo sapiens; identical to SEQ ID NO: 62020

SEQ ID NO: 62220 - DNA, 548 bp, Homo sapiens; identical to SEQ ID NO: 62155
  misc_feature 404, 483, 515, 536, 540: n = A,T,C or G

SEQ ID NO: 62221 - DNA, 348 bp, Homo sapiens; identical to SEQ ID NO: 62025

SEQ ID NO: 62222 - DNA, 570 bp, Homo sapiens; identical to SEQ ID NO: 62157
  misc_feature 3: n = A,T,C or G

SEQ ID NO: 62223 - DNA, 642 bp, Homo sapiens; identical to SEQ ID NO: 62160
  misc_feature 247, 275, 307, 351, 362, 371, 386, 422, 435, 447, 514, 524,551, 603, 614: n = A,T,C or G

SEQ ID NO: 62224 - DNA, 574 bp, Homo sapiens; identical to SEQ ID NO: 62161

SEQ ID NO: 62225 - DNA, 511 bp, Homo sapiens; identical to SEQ ID NO: 62162

SEQ ID NO: 62226 - DNA, 341 bp, Homo sapiens; identical to SEQ ID NO: 62164
  misc_feature 142, 188, 248: n = A,T,C or G

SEQ ID NO: 62227 - DNA, 251 bp, Homo sapiens
  misc_feature 3, 70, 81, 132, 179, 213, 218: n = A,T,C or G
ttntgcacacaggactcgcaccaagaaagctgttcagatacacgacatgggccatggattttgagaaatntaggatggctnaggaaggctcaactaacatcccagaggaccaactggtgtttcagcaatagnactgggccctaaccaaggatctggaaacatgcttagccgaattttanaattgatgtggactattcctccttctaaatagantcgantattaaggctatcctatcctatctcaatagtgt

SEQ ID NO: 62228 - DNA, 314 bp, Homo sapiens; identical to SEQ ID NO: 62167

SEQ ID NO: 62229 - DNA, 456 bp, Homo sapiens
  misc_feature 3: n = A,T,C or G
gcnaattggagctccccgcggtggcggccgaggtacacgaactaaattttttaaactttatttgctgttaaattctgtgaagtttcagttatctaaaataaatatacacaaatatgaaatataatgtttcagattgcaaggtaatatgtaatagtagtgtttgtaagatactcttgtctaatattaactagtagtattttgatttgtacaatgtcaccctcccagcaacaagaagaacaagctactgaatcagtgtccctttattactatggcatcaaagatttggctactgttttcttctacatgctagtggcgataattattcatgccgtaattcaagagtatatgttggataaaattaacaggcgaatgcacttctccaaaacaaaacacagcaagtttaatgaatctggtcagcttagtgcgttctacctttttgcctgtgtttggggcaca

SEQ ID NO: 62230 - DNA, 288 bp, Homo sapiens; identical to SEQ ID NO: 62168

SEQ ID NO: 62231 - DNA, 147 bp, Homo sapiens; identical to SEQ ID NO: 62036
  misc_feature 8, 9, 11, 50, 83: n = A,T,C or G

SEQ ID NO: 62232 - DNA, 577 bp, Homo sapiens; identical to SEQ ID NO: 62170
  misc_feature 53, 58, 59, 143, 173, 197, 242, 303, 432, 491, 504, 514, 537: n = A,T,C or G
